(19) United States
(12) Patent Application Publication
(10) Pub. No.: US 2011/0195848 A1
(43) Pub. Date: Aug. 11, 2011

(54) GENE EXPRESSION AND BREAST CANCER

(76) Inventors: Avtar S. Roopra, Madison, WI (US); Matthew P. Wagoner, Wilmington, DE (US)

(21) Appl. No.: 12/987,910

(22) Filed: Jan. 10, 2011

Related U.S. Application Data
(60) Provisional application No. 61/293,404, filed on Jan. 8, 2010.

(51) Int. Cl. C12Q 1/68; C40B 30/00

(52) U.S. Cl. 506/7; 435/6.14; 435/6.12

(57) ABSTRACT

This invention provides methods and reagents for determining breast cancer patient prognosis and/or diagnosis of tumor aggressiveness, disease-free survival times and reduced patient disease-free survival metrics.

[0001] This application claims the priority benefit of U.S. provisional patent application Ser. No. 61/293,404 filed Jan. 8, 2010, the entirety of which is herein incorporated by reference. The sequence listing submitted herewith is incorporated by reference in its entirety.

### FIELD OF THE INVENTION

[0002] This invention provides diagnostic methods and reagents for identifying cancer, as well as methods and reagents for making a prognosis of cancer patient survival. More particularly, certain embodiments of the invention provide one or a plurality of differentially-expressed genes associated with cancer, wherein said pluralities comprise what are termed herein “gene signatures.” Gene signatures are used according to methods disclosed herein to identify aggressive breast cancers having poorer patient prognosis and lower post-diagnosis survival than breast cancer not displaying a gene signature of the invention. Particularly advantageous gene signatures comprise LIN28, CELF4 or CELF6, which provide useful biomarkers for aggressive breast cancers. Additional gene signatures for aggressive breast cancers comprise genes observed to be upregulated in such cancers. In other embodiments, the invention provides reagents and methods for identifying dysfunction in patient or cell samples of a gene, REST/NRSF, also related to an aggressive breast cancer phenotype. This invention further provides methods and reagents for detecting tumors that express particular REST/NRSF variants, including in particular REST4, indicative of such aggressive breast cancers and methods for determining patient prognosis for individuals having breast cancer tumors expressing said variants. The invention also provides methods and reagents for detecting elevated miR-124, which is identified herein to be elevated in aggressive breast cancers that are deficient in REST function.

### BACKGROUND OF THE INVENTION

[0003] Breast cancer is the most common type of cancer among women in the United States. In 2009, an estimated 192,000 U.S. women were newly-diagnosed with breast cancer. (National Cancer Institute (NCI), 2009, www.cancer.gov/cancertopics/types/breast). One histological parameter used to characterize breast cancer tumors is estrogen receptor alpha (ER) status. Approximately 70% of all breast cancers express ER (i.e., they are termed “ER+”). Patients with ER+ tumors tend to have a better prognosis and greater life expectancies than patients with ER deficient (i.e., ER−) tumors (Cella et al., 2006, Breast Cancer Res Treat 100: 273; Howell, 2006, Rev Recent Clin Trials 1: 207). However, the ER+ patient population is heterogeneous. A portion thereof demonstrates poor outcomes despite tumors exhibiting the same molecular, histological and grade markers as patients with more positive prognoses. This observation illuminates a need in the art for identifying robust, reliable markers and prognostic indicators that can accurately predict patient outcome and/or facilitate selection of appropriate breast cancer treatment regimens.

### Neuron Restrictive Silencing Factor (NRSF)

[0004] Neuron restrictive silencing factor (NRSF), also known as REST (RE1 Silencing Transcription Factor), represses transcription of neuronal genes in non-neuronal cells by recruiting chromatin modifiers to a 21 bp element termed neuron restrictive silencing elements (NRSE). REST/NRSF was originally isolated in a screen looking for factors that confer neuron-restricted gene expression upon neuronal genes (Chong et al., 1995, Cell 80: 949; Schoenherr et al., 1995, Science 267: 1360). REST/NRSF was found to function by repressing expression of a number of neuronal genes in non-neuronal tissue by binding to NRSEs found in the regulatory regions of these genes. Subsequently, around 2,000 genes have been found to be direct targets of REST/NRSF in human and mouse genomes (Bruce et al., 2004, Proc Natl Acad Sci USA 101: 10458).

[0005] A particular mutation in REST/NRSF was found in several colon cancer samples, and thus REST/NRSF was thought to be a possible tumor suppressor gene in colon cancer (Westbrook et al., 2005, Cell, 121:837-848). Subsequently, it was found that REST/NRSF mRNA expression was lost in roughly one third of the colon and small cell lung cancer samples examined. In mammary cells, reducing REST/NRSF function either by RNAi or the use of dominant negative protein expression promoted malignant transformation of genetically-engineered human mammary epithelial cells (Westbrook et al., 2005, Cell 121: 837-848), suggesting that decreased REST/NRSF mRNA levels could be a possible feature of breast cancer etiology. However, the analysis of numerous patient breast tumor samples showed no decrease in REST mRNA levels.

[0006] As set forth above, estrogen receptor positive (ER+) breast cancers are a heterogeneous population of cancers with varying etiologies and clinical outcomes. Although many patients with ER+ breast cancers initially respond well to surgery and ER-targeted therapies (including selective estrogen receptor modulators and aromatase inhibitors), these therapies frequently are not sufficient to prevent disease recurrence or metastasis for all patients with ER+ tumors. Likewise, some populations of ER− breast cancer tumors are less responsive to treatment. Thus, some types of ER+ and ER− breast cancers are particularly aggressive and have very low survival rates. There is a need in the art for reagents and methods for identifying aggressive ER+ tumors, aggressive ER− tumors, and therapy-resistant tumors. Such reagents and methods would aid in early identification of aggressive breast cancers, would facilitate selection of appropriately tailored treatment regimens, and in turn promote improved patient survival rates.

### SUMMARY OF INVENTION

[0007] This invention provides reagents and methods for identifying patients with aggressive breast cancer tumors. The reagents and methods of this invention are directed to detecting altered, particularly reduced, expression of functional REST/NRSF protein in breast cancer tumor samples. Specific embodiments of the reagents and methods of the described invention are adapted for detecting alternative splice variants of REST/NRSF. In one embodiment, detecting splice variants that produce loss-of-function REST/NRSF protein variants are included; a non-limiting example of such a splice variant is identified herein as REST4. In additional embodiments, the reagents and methods provided herein detect altered, particularly increased gene expression for a plurality of genes disclosed herein to occur in breast tumor samples, including but not limited to genes set forth in greater detail herein (see Tables 1-4, and 6). Certain embodiments of the invention also provide one or a plurality of genes disclosed herein to exhibit altered expression in breast tumor samples, providing in these embodiments diagnostic gene expression profiles (termed herein “gene signatures”) for identifying aggressive breast cancer tumors. In additional embodiments, the invention provides diagnostic methods using such gene signatures to identify individuals having aggressive breast cancer tumors. In other embodiments, the invention provides prognostic methods using such gene signatures for identifying individuals that are expected to have reduced survival rates, having either estrogen receptor positive (ER+) or estrogen receptor negative (ER−) phenotypes. Certain embodiments of the methods of this invention are adapted to identifying aggressive gene signature-bearing tumors from breast tumors otherwise indistinguishable by conventional markers such as, inter alia, ER expression pattern.

[0008] In particular embodiments, the invention provides gene signatures comprising one or a plurality of genes as set forth in Table 1 or Table 6 below. In certain embodiments, gene signatures of the invention comprise at least LIN28. In alternative embodiments, gene signatures comprise at least CELF4, CELF5, or CELF6. In a further embodiment, elevated expression levels for certain miRNAs, and in particular, miR-124 provides a signature for aggressive breast cancer tumors.

[0009] As used with methods set forth herein, gene signatures provided by the invention are useful for identifying aggressive subsets of breast cancer tumors, particularly ER+ breast cancer tumors, independently of other existing predictors of poor prognoses, such as tumor grade, size, patient age and HER2 status; as set forth above, these conventional disease status markers are inadequate to reliably identify patients bearing tumors with said capacities for aggressive tumor growth. Patient or cell samples exhibiting gene signatures of this invention have been associated with greatly reduced survival rates as set forth herein below. As provided herein, certain of the genes in a gene signature are upregulated (wherein expression of said gene is higher than in non-tumor breast tissue) to varying degrees in certain breast tumor samples. Upregulation of gene expression in said genes comprising gene signatures of the invention can be detected from breast cancer samples using methods known to the skilled worker, including in non-limiting examples microarray analysis, conventional hybridization-based RNA detection assays, immunoassay and immunohistochemistry (IHC) and protein-directed techniques (such as biochemical activity assays). Additional embodiments of the methods of the invention are provided to detect aggressive breast cancer tumor samples having altered, particularly reduced, expression of functional REST/NRSF. Detection methods for gene signatures can also be used to detect reduced or otherwise altered REST/NRSF expression, including REST4, in breast cancer samples.

[0010] In other aspects, the invention provides methods for prognosing breast cancer survival and methods for selecting appropriate drug treatment regimens based on tumor aggressiveness. Identifying gene status and/or aggressiveness of a breast tumor reduces the likelihood that a treatment having a low probability of success will be administered, and enables patients and practitioners to make improved quality-of-life decisions.

[0011] The invention also provides kits for performing the methods disclosed herein.

[0012] The use of the methods of this invention is beneficial for early detection of reduced prognosis of patient survival using breast cancers tumor samples, regardless of the status of estrogen receptor or other conventional prognostic markers in such tumors. This in turn permits clinical selection of drug therapies better suited to aggressive tumors, promoting improved patient survival rates.

[0013] Specific preferred embodiments of the present invention will become evident from the following more detailed description of certain preferred embodiments and the claims.

### BRIEF DESCRIPTION OF THE DRAWINGS

[0014] The patent or application file contains at least one drawing executed in color. Copies of this patent or patent application publication with color drawing(s) will be provided by the Office upon request and payment of the necessary fee.

[0015] This invention can be further appreciated and understood from the following detailed description taken in conjunction with the drawings wherein:

[0016] FIGS. 1A-1D are graphs illustrating that REST/NRSF mRNA is not significantly reduced or absent in breast tumors with respect to normal breast tissue. FIG. 1A shows graphs of relative REST/NRSF mRNA levels for two different datasets of breast tumor and normal breast tissue samples. The E-TABM-276 dataset (Normal: n=10, Breast Tumor: n=51) and GDS2250 dataset (Normal: n=7, Breast Tumor: n=40) are shown, wherein mean REST/NRSF mRNA levels in both tumor and normal tissue are illustrated (+/−Standard Deviation). FIG. 1B shows graphs of REST/NRSF mRNA levels for each individual tumor in the E-TABM-276 and GDS2250 datasets represented in FIG. 1A. FIG. 1C is a graph of mean REST/NRSF mRNA levels compared across varying tumor grades (+/−Standard Deviation) in breast tumor dataset GSE5460. FIG. 1D shows graphs of mean REST/NRSF mRNA levels. Levels are substantially unchanged across REST/NRSF negative tumors (RESTless, GDS2250) and REST/NRSF positive tumors (RESTfl tumors, GSE5460) (+/−Standard Error).

[0017] FIG. 2A is a photograph of Western blot analysis demonstrating REST/NRSF expression in three REST/NRSF expression knock-down cell lines (HEK, MCF10a, and T47D). REST/NRSF expression was knocked down using lentiviral delivery of shRNA specific for REST/NRSF (shREST) or negative control non-targeting shRNA (shControl). Positive controls for relative protein levels are shown by Actin in bottom panels. FIG. 2B is a Venn diagram illustrating the commonality of genes that were up-regulated at least 2-fold in the REST/NRSF knock-down cell lines. Twenty-four genes were in common between all three cell lines. (See Table 1).

[0018] FIG. 3 illustrates microarray results for gene expression from breast cancer tumor samples. mRNA expression levels of cellular genes (the positions of which are identified on the righthand side of the array) in breast cancer tumors (identified across the top border of the array) were assessed. Increased gene expression is shown in red (clustered in the center of the microarray).

[0019] FIG. 4 illustrates microarray results for gene expression from small cell lung cancer tumor samples and cell lines including the H69 SCLC cell line that is known to show high levels of aberrant REST splicing. mRNA expression for a number of housekeeping genes and genes with REST/NRSF-regulated expression are shown, wherein red indicated increased gene expression (see arrow).

[0020] FIG. 5 illustrates microarray results for gene expression from breast cancer tumor samples from the U.S. and Sweden, where the X axis represents individual tumors and the Y axis represents specific genes. Two breast cancer microarray databases were interrogated for the presence of the REST/NRSF gene signature and tumors with REST/NRSF dysfunction identified, wherein increased gene expression is shown in red (clustered in the lower lefthand corner of the U.S. array and approximately the middle of the Swedish sample array). Approximately 5% of breasts cancer tumors displayed the REST/NRSF gene signature.

[0021] FIG. 6 illustrates microarray results for gene expression from normal and stromal breast tissue. Cluster diagram compares the expression levels of the REST/NRSF gene signature genes across 66 samples of normal breast tissue, taken either as normal breast tissue from mammaplasty or as stromal tissue adjacent to tumor (GSE4823). No enrichment in REST/NRSF target genes was noted in either normal or stromal tissue.

[0022] FIG. 7 is a graph of disease-free survival of ER+ breast cancer patients, wherein patients positive for the REST/NRSF gene signature exhibited reduced survival rates compared to patients negative for the gene signature.

[0023] FIG. 8A illustrates microarray results for gene expression from 129 breast cancer tumors (GSE5460) interrogated with the 24-gene REST/NRSF gene signature shown in Table 1. Five tumors showed a concerted overexpression of REST/NRSF target genes, suggesting a loss of REST/NRSF repression. FIG. 8B illustrates microarray results for gene expression in RESTless or RESTfl tumors. Expression of genes was significantly upregulated in RESTless tumors (p<10⁻⁷), shown; >85% of these genes are either known or putative REST/NRSF target genes. Arrows indicate tumors from which RNA was available for further analysis. FIG. 8C is a panel of graphs demonstrating Gene Set Enrichment Analysis of breast tumor dataset GSE5460. The graphs illustrate increased expression of REST/NRSF target genes in RESTless tumors using three separate sets of experimentally defined REST/NRSF target genes. The first graph shows that a gene set comprised of 24 genes (termed herein the “24 REST/NRSF gene signature”) that was consistently upregulated at least two-fold (see Table 1) upon experimentally-induced REST/NRSF knockdown in MCF10a, HEK-293 and T47D cell lines was enriched in RESTless tumor samples. The second graph shows that that genes upregulated at least two-fold upon REST/NRSF knockdown across the average of all three cell lines was also enriched in RESTless tumors. The third graph shows the results of this same analysis for a “REST ChIPSeq” gene list (that is populated by genes identified as being bound by REST/NRSF in Jurkat T-cells using ChIPSeq) was enriched in RESTless tumors (Johnson et al., 1997, Science, 326:1497-1502).

[0024] FIG. 9A is a photograph of agarose gel electrophoresis of the results from an RT-PCR analysis for full-length REST/NRSF and truncated REST4 splice variants. Tumors positive in microarray assay for the REST/NRSF gene signature were assayed, wherein RNA from two gene signature-bearing tumors (GS1 and GS2) and from a control tumor negative for the REST/NRSF gene signature were subjected to RT-PCR using primers flanking the alternative exon splice site of wildtype and splice variant forms of REST/NRSF. The Figure shows that GS1 and GS2 expressed REST4 splice variant whereas the control tumor expressed full-length REST/NRSF. The lane labeled (--) represents sham amplification with no input RNA. FIG. 9B illustrates full length REST/NRSF and the REST4 alternatively spliced product. Primer sets utilized for quantitative real-time RT- PCR are shown.

[0025] FIG. 9B illustrates full length REST/NRSF and the REST4 alternatively spliced product. Primer sets utilized for quantitative real-time RT-PCR are shown.

[0026] FIG. 10A is a photograph of an agarose gel illustrating RT-PCR results for REST4 and wild-type REST expression levels. RNA from nine breast tumors was isolated and designated as GSM124998, GSM125004, GSM125011, GSM125015, GSM125019, GSM125027, GSM125050, GSM125080 and GSM125088. RNA was reverse-transcribed and PCR amplified with primers flanking the REST/NRSF alternative intron/exon junction (REST primer set). In FIG. 10B, selective PCR amplification of REST4 from tumor samples (using primers that target the REST4 50 bp exon (REST4 primer set)) demonstrated the presence of REST4 in the RESTless tumors, but not in any of the REST/NRSF competent tumors.

[0027] FIG. 11 is a graph of REST4 mRNA relative to Actin. Analysis of REST4 levels in nine tumors represented in the microarray dataset GSE5460 is shown. REST4 mRNA was detected in RESTless, but not RESTfl tumors after 35 cycles of amplification.

[0028] FIGS. 12A-12D is a panel of photographs showing immunohistochemically-labeled antibody treatment of REST/NRSF positive breast tissue and RESTless tumors. Paraffin-embedded breast tumor sections were immunohistochemically labeled with an antibody to the C-terminus of REST. FIG. 12A is a photograph of breast tumor that showed strong nuclear staining for the C-terminus of REST. FIG. 12B is a photograph of a different breast tumor stained for REST C-terminus that showed no staining in the nucleus or cytoplasm, indicating a lack of full length REST protein. The significance of these findings is that most, if not all of the known functions of REST involve its localization to the nucleus. Accordingly, cytoplasmic staining in the absence of nuclear staining was also considered to be RESTless. FIGS. 12C and 12D are photographs showing functional loss of REST/NRSF as indicated by the appearance of chromogranin-A, a REST/NRSF target gene, in the RESTless tumors of 12D. Samples that stained negative for REST/NRSF showed a statistically significant enrichment in staining for the REST target chromogranin-A (CHGA), consistent with a loss of REST/NRSF repression. RESTless tumors accounted for 80% of all ectopic chromogranin A staining in the breast (p<0.001). Inset image is enlarged 2× to show detail.

[0029] FIG. 13 is a panel of graphs illustrating that a significantly poorer prognosis was observed for patients with REST/NRSF negative (RESTless) tumors. Patients with REST/NRSF negative breast tumors showed significantly decreased disease-free survival time (p=0.007, n=182), and increased incidence of relapse (p=0.054, n=182), particularly in the first three years post-diagnosis.

[0030] FIGS. 14A-14D are graphs illustrating that a loss of REST/NRSF increased the aggressiveness of MCF7 tumor growth in nude mouse xenografts. FIG. 12A demonstrates that tumor “take rate” in the mammary fat pads was significantly higher for shREST versus shCon cells (p=0.005). Data is expressed as fraction of injection sites that remained tumor-free. FIG. 14B shows that tumor burden in the mammary fat pads was significantly larger in shREST vs shCon tumors (p=0.005). FIGS. 14C and 14D demonstrate that the tumor take rate (p=0.040) and tumor burden (p=0.037) were greater for shREST than shCon cells when injected subcutaneously into the flanks of athymic nude mice. FIG. 14E is a photograph of a representative bright field microscopy image of a hematoxylin and eosin stained section of an shREST tumor. Arrows indicate muscle fibers incorporated into tumor thereby showing local invasion. Together, these Figures show increased tumorigenesis by REST/NRSF deficient cells.

[0031] FIGS. 15A-15E illustrate REST/NRSF regulation of LIN28 expression. FIG. 15A is a panel of graphs showing elevated LIN28 expression levels as determined by quantitative real time RT-PCR in two breast cancer cell lines T47D and MDA-MB-231 that stably express REST-targeted shRNA (i.e., that are REST/NRSF deficient). FIG. 15B is graphs of chromatin immunoprecipitations with an antibody to REST/NRSF showing enrichment of a LIN28 RE1 site 2 kb upstream of the LIN28 promoter. FIG. 15C is a panel of photographs of Western blot analyses of REST, c-Myc, LIN28, beta-actin, and Ras (wherein the antibody used cross-reacted with H, N, and K-Ras) protein from MCF7 cells stably expressing control or REST-targeted shRNA. Representative protein blots are shown, quantitated using a Kodak Image Station 2000R. FIG. 15C includes graphs representing three independent experiments, shown to the right. FIG. 15D is a “Box and Whisker” plot representation of relative LIN28 mRNA levels in the RESTless and RESTfl breast tumors from dataset GSE4922 covering 289 tumors. The lines on the box represent the LIN28 levels in samples from the 75^{th}, 50^{th} and 25^{th} percentiles (top line, middle line, and bottom line, respectively). The whiskers extend to the 90^{th} (top bar) and 10^{th} (bottom bar) percentiles on LIN28 expression in that tumor group, and the ten percent highest and lowest expression values for each individual tumor are expressed as dots outside the whiskers. FIG. 15E illustrates loss of REST/NRSF inhibition of LIN28 is sufficient to account for focus formation of MCF7 cells. Stable expression of shRNA against REST, but not non-targeting control shRNA, induced spontaneous, subconfluent focus formation in MCF7 breast cancer cells. Top left: quantification of spontaneous foci using REST shRNA and a control non-targeting shRNA. Top right: sample foci. Expression of another REST shRNA in a LIN28^{WT} MCF7 cell line also induced spontaneous foci formation. Expression of REST shRNA in LIN28^{low} MCF7 cells expressing shRNA against LIN28, however, did not effectively induce focus formation.

[0032] FIG. 16 is a photograph of a Western blot analysis comparing REST/NRSF and LIN28 protein levels in T47D cells expressing REST-targeted shRNA and control. Actin controls are shown at bottom as a loading control.

[0033] FIG. 17A-17D demonstrates that REST is a direct transcriptional repressor of LIN28. FIG. 17A is a schematic illustrating the canonical REST binding (RE1) site ˜2 kb upstream of the LIN28 transcriptional start site, which is conserved throughout mammalia. FIG. 17B is a graphical representation of a chromatin immunoprecipitation in MCF7 cells using anti-REST or IgG (sham) antibodies showing that REST bound the LIN28 RE1 site with higher affinity than it bound the RE1 site of the classic REST target gene BDNF. The REST promoter, which does not contain an RE1 site, is shown as a negative control. FIG. 17C is a photograph of a Western blot analysis of LIN28 protein in and REST protein in T47D cells stably expressing a non-targeting control (shCon) or anti-REST shRNA (shREST). FIG. 17D is a photograph of an immunoblot analysis of LIN28, c-Myc and Ras (antibody recognizes H, N and K-Ras) protein in MCF7 cells stably expressing a non-targeting control (shCon) or anti-REST shRNA (shREST). Beta-actin is shown as a loading control in both FIGS. 17C & 17D.

[0034] FIGS. 18A and 18B are graphs showing that LIN28 contributed to the migratory phenotype of shREST cells. FIG. 18A shows serum-starved MCF7 cells expressing a control (shCon) or anti-REST (shREST). shRNA were allowed to migrate across a filter containing 8 μm pores towards 10% FBS for 24 hours, and migrated cells were counted. shREST cells are shown to be more migratory than shCon cells (p=0.025). FIG. 18B represents the results of shREST MCF7s further expressing a control (−shLIN28) or anti-LIN28 (+shLIN28) shRNA. Cells were allowed to migrate as in FIG. 18A. shREST cell lost their enhanced migratory phenotype upon knockdown of LIN28 expression.

[0035] FIG. 19A-19D is a panel of graphs illustrating that LIN28 contributed to the tumorigenicity of shREST MCF7 cells in mice. shREST-expressing MCF7 cells stably expressing an anti-LIN28 (+shLIN28) or non-targeting control (−shLIN28) shRNA were injected subcutaneously into the flanks or mammary fat pads of athymic nude mice, and tumor take rate was assessed. FIG. 19A shows that tumor take rate in mammary fat pads was decreased upon LIN28 knockdown (p=0.024), with 6/12 control (−shLIN28) and only 1/12 LIN28 knockdown (+shLIN28) injections giving rise to tumors by 100 days post-injection. FIG. 19B shows that tumor burden was decreased when LIN28 is knocked down in shREST MCF7s injected into the mammary fat pads of athymic nude mice (p=0.037); at 100 days post-injection, the volume of control (−shLIN28) tumors was 345 mm³, compared with only 56 mm³ for LIN28 knockdown (+shLIN28) tumors. FIG. 19C shows 100 days post-injection, the overall tumor take rate (at all injection sites) was 42% (10/24) for control but only 12.5% (3/24) for LIN28 knockdown cells (p=0.03). FIG. 14D shows that total tumor burden was decreased in shREST cells expressing an anti-LIN28 shRNA (p=0.02). At 100 days post-injection, the total tumor volume for control (−shLIN28) tumors was 867 mm³, compared with 149 mm³ for LIN28 knockdown (+shLIN28) tumors.

[0036] FIG. 20 is a box and whisker plot illustrating that LIN28 mRNA levels were increased in human tumors lacking functional REST. The plot represents LIN28 mRNA levels in 289 RESTless and REST-containing (“RESTfl”) breast tumors from dataset GSE4922 (Ivshina et al., 2006, Cancer Res. 66: 10292-301). The lines on the box represent the 75^{th}, 50^{th} and 25^{th} percentiles; the whiskers represent 90^{th} and 10^{th} percentile of LIN28 expression in each tumor group. The median level of LIN28 expression in RESTless tumors was greater than the 90^{th} percentile for REST-containing tumors.

[0037] FIG. 21 are photographs of agarose gel electrophoresis of an RT-PCR analysis for REST4 splice variants. Primers flanking the REST N-exon, which detects both REST and REST4 splice variants, were used to amplify cDNA from HEK-293, MCF7 and T47D cell lines stably expressing shRNA against REST or a non-targeting control sequence. The observed size shift in the REST shRNA cells was indicative of REST4 N-exon inclusion. REST knockdown induced REST4 splicing.

[0038] FIG. 22 is a graph of miR-124 expression in MCF7 cells following REST knockdown (Rest shRNA). Mature miR-124 levels are shown as measured by quantitative PCR (Taqman qPCR). REST knockdown in MCF7 cells induces the expression of miR-124, a known REST target, relative to an actin mRNA control. n=6, Wilcoxon rank sum test p<0.05.

[0039] FIG. 23 is an illustration of intronic sequences surrounding the REST4 N-exon. The REST4 N-exon is flanked by canonical PTB (polypyrimidine tract binding protein) binding sites. The REST4 N-exon encodes the stop codon responsible for truncating REST to form REST4. The N-exon is flanked on both sides by the canonical PTB binding sequence (UUCU). Consistent with a role for PTB in disrupting exon inclusion, the binding elements are 22 nt 5′ and 42 nt 3′ of the exon-intron junctions. The 5′ PTB binding sequence is contiguous with a polypyrimidine tract, as is often the case in PTB binding elements 5′ of alternative exons.

[0040] FIG. 24 is a photograph of a Western blot of protein PTB. Protein lysate from HEK-293 shControl and shREST cells were blotted for PTB, with an actin loading control. HEK-293 shREST cells show diminished PTB protein levels with respect to their control counterparts, indicating the REST knockdown cells express low levels of PTB protein.

[0041] FIG. 25A is a photograph of a Western blot of PTB protein in HEK-293 and MCF7 PTB knockdown cell lines. FIG. 25B is a graph representing REST4 levels in the same cells. Stable cell lines expressing shRNA targeting a nontargeting control sequence or PTB were generated. FIG. 25A represents a Western blot confirming PTB knockdown in HEK-293 and MCF7 cells. FIG. 25B shows that PTB knockdown was sufficient to upregulate REST4 expression in both cell lines, as measured by qPCR using REST4 specific primers. Therefore knockdown of PTB induces REST4 splicing in HEK-293 and MCF7 cells. Error bars represent standard error. n=1 for HEK-293 shControls, n=2 for all other samples.

[0042] FIG. 26 is a photograph of agarose gel electrophoresis of an RT-PCR analysis for REST and REST4 splice variants on HEK-293 shPTB knockdown cells. Amplification of cDNA from shCon and shPTB HEK-293 cells was performed using primers that detected both REST and REST4 splice variants. Knockdown of PTB was not sufficient to induce the inclusion of the N-exon in a significant fraction of total REST mRNA.

[0043] FIG. 27 is a graph illustrating a significance analysis of microarrays identifying genes that were upregulated in MCF7s upon REST knockdown. Expression profiles for MCF7 shCon and shREST cells were assayed by microarray, and the resulting data were analyzed using significance analysis of microarrays (SAM). Gene expression was plotted for each gene with respect to their intensity in shControl and shREST cells. Genes falling along the solid line show equal expression in both cell groups. Genes above the solid line were enriched in shREST cells, below the solid line were enriched in shCon cells. Genes falling outside of the dotted lines had a median false discovery rate <1%, suggesting that their enrichment in either group was unlikely to occur by random chance. 118 mRNAs were significantly upregulated in MCF7 shREST cells (red). The only gene downregulated in shREST cells (green) was REST.

[0044] FIG. 28A-28C is a panel of graphs representing REST knockdown induction of CELF4 or CELF6 mRNA upregulation based on microarray data of CELF4 and CELF6 mRNA levels in shControl and shREST HEK-293, T47D and MCF7 cells. FIG. 28A shows that REST knockdown induced CELF6 mRNA in three cell lines that also displayed REST4 splicing upon REST knockdown. FIG. 28B shows that CELF4 mRNA was enriched upon REST knockdown in HEK-293 and MCF7 cells. FIG. 28C confirmed that CELF6 upregulation upon REST knockdown in MCF7 cells was demonstrated by qPCR, confirming what was seen by microarray. CELF6 mRNA level was normalized to beta actin.

[0045] FIG. 29 is an illustration of CELF4, CELF5 and CELF6 genes and predicted consensus RE1 sites. Sites for which REST ChIP-Seq data were available have the number of reads for REST and IgG ChIPs graphed underneath each site (Johnson et al., 2007, Science, 316:1497-1502). Coding regions are depicted as black bars, untranslated regions are gray bars.

[0046] FIG. 30A-30B is a pair of graphs representing REST chromatin immunoprecipitation in MCF7 cells at CELF4 RE1 sites. Chromatin immunoprecipitation was performed on MCF7 chromatin with non-specific IgG and REST antibodies. FIG. 30A shows that qPCR amplification of the precipitated DNA confirms strong enrichment of REST binding at the double RE1 site in CELF4 intron 7. FIG. 30B shows that enrichment of REST binding is also observed at the first RE1 site in CELF4 intron 1, though the binding is significantly weaker than was observed for the exon 7 RE1 site.

[0047] FIG. 31 is a graph illustrating that CELF4 mRNA is elevated in RESTless breast tumors. CELF4 mRNA levels in 129 breast tumors are quantified using six independent probes. Tumors were divided into those that had normal levels of REST function (RESTfl, n=124) and low levels of REST function (RESTless, n=5), and mean RESTfl CELF4 signal intensity was used to normalize CELF4 expression across all tumors. Error bars represent standard error.

[0048] FIGS. 32A-32C show that expression of CELF4 or CELF6 is sufficient to permit REST4 splicing. FIG. 32A is a photograph of agarose gel electrophoresis of the results of a qPCR and a graph illustrating REST4 mRNA levels. Stable infection of HEK-293 cells with lentivirus bearing CELF4 (BRUNOL4) or CELF6 (BRUNOL6) coding sequence was sufficient to induce a dramatic increase in REST4 mRNA levels, as measured by qPCR. FIG. 32B is a graph showing that the infection of MCF7 cells with virus bearing either CELF4 (BRUNOL4) or CELF6 was sufficient to induce REST4 expression, as measured by qPCR.

### DETAILED DESCRIPTION OF PREFERRED EMBODIMENTS

[0049] The invention is more specifically described below and particularly in the Examples set forth herein, which are intended as illustrative only, as numerous modifications and variations therein will be apparent to those skilled in the art.

[0050] As used in the description herein and throughout the claims that follow, the meaning of “a”, “an”, and “the” includes plural reference unless the context clearly dictates otherwise. The terms used in the specification generally have their ordinary meanings in the art, within the context of the invention, and in the specific context where each term is used. Some terms have been more specifically defined below to provide additional guidance to the practitioner regarding the description of the invention.

[0051] As described herein, reagents and methods for identifying an aggressive subset of breast cancer tumors is provided, regardless of the status (ER+ or ER−) of estrogen receptor expression in such tumors (a conventional albeit unreliable indicator of tumor aggressiveness). As used herein, the term “aggressive” when used with respect to tumors, particularly breast cancer tumors, will be understood to identify such tumors that are more likely to reoccur and/or metastasize than the majority of breast cancer tumors. As disclosed herein, aggressive breast cancer tumors exhibit altered, typically increased, expression of a subset of cellular genes identified herein as a gene signature. Altered expression of these genes is also shown herein to be associated with production in cells and breast cancer tumor samples of a dysfunctional or non-functional form of a transcription suppressor, termed Neuron Restrictive Silencing Factor (NRSF) and also known as REST (and abbreviated herein as REST/NRSF). The REST/NRSF protein has been identified previously as a putative tumor suppressor and for having a role in cancer progression when reduced expression of REST/NRSF mRNA has been detected in some tumor samples (but specifically not breast cancer). Without wishing to be bound to any mechanistic explanation of the data presented herein, the invention provides reagents and methods for identifying aggressive breast cancer tumors by detecting expression of a gene signature comprising one or a plurality of genes as disclosed herein, or alternatively detecting altered, particularly reduced or aberrant, expression of REST/NRSF in breast cancer tumor samples, or both. In specific embodiments as set forth herein, detection of reduced functional REST/NRSF expression can be achieved by detecting reduced REST protein, increased REST variant protein or decreased native REST mRNA expression accompanied by increased mRNA expression of REST variant species.

[0052] As disclosed herein, the gene signatures identified and provided by this invention comprise one or a plurality of cellular genes that have altered, generally increased, expression in tumor samples of aggressive breast cancer tumors. In certain embodiments, increased expression of genes comprising the gene signatures set forth herein are associated with reduced or more particularly aberrant expression of REST/NRSF (termed herein RESTless tumor samples); in particular, RESTless tumors are those that do not show nuclear staining of full-length REST protein as detected inter alia by immunohistochemistry. In some embodiments, REST protein in such tumors was found in the cytoplasm but not the nucleus.

[0053] In either embodiment, altered gene expression is relative to less aggressive breast cancer tumor samples, wherein tumor samples expressing the gene signatures of the invention show greater expression of said genes, whereas expression of REST/NRSF is decreased or altered in certain embodiments of said aggressive breast cancer tumor samples. This invention provides such gene signatures and methods of use thereof for identifying aggressive breast cancer tumors, or reduced or dysfunctional REST/NRSF expression, in patient samples and to provide prognoses and diagnoses thereby. It is an advantage of this invention that altered expression of the genes comprising each of the gene signatures provided herein can be readily detected using methods well known to the skilled worker.

[0054] In particular embodiments, the invention provides reagents and methods for identifying aggressive breast cancer tumors that are REST/NRSF-deficient. In certain embodiments, the invention provides methods for providing a prognosis of breast cancer patient survival rates for breast cancer patients regardless of the estrogen receptor status (ER+ or ER−) of their tumors. In particular, detection of reduced, altered or aberrant REST/NRSF expression can be used to provide a prognosis of breast cancer patient survival rates for breast cancer patients or to select appropriate cancer therapies.

[0055] As disclosed herein, identifying a gene signature of this invention in breast cancer patient tumors can be an independent predictor of poor prognosis in breast cancer. Accordingly, additional embodiments of the invention are directed to using said cancer patient prognosis determined using the gene signatures to select appropriate cancer therapies.

[0056] The “gene signatures” are provided in additional aspects of the invention, comprising one or a plurality of genes, the expression of which is altered in aggressive breast cancer tumor samples. As used herein, the term “altered,” “modulated” or “differential” expression includes both increased as well as decreased expression of certain genes, compared to breast tumor samples that are not aggressive. In aggressive breast cancer tumors as disclosed herein, genes comprising gene signatures of the invention exhibit differential expression. In certain embodiments, differential expression comprises increased expression in said certain genes compared to normal breast tissue or REST/NRSF-positive (termed “RESTfl”) tumors. Breast cancer tumor samples expressing gene signatures provided by the invention are identified as described herein. In certain aspects, breast cancers exhibiting more aggressive tumorigenesis and poorer patient survival prognosis are identified by the disclosed methods for detecting such gene signatures. As provided herein, gene signatures comprise one or a plurality of the genes set forth in Tables 1- 4, or 6. In alternative embodiments, aggressive breast cancer tumors are identified and characterized by reduced, altered or aberrant expression of REST/NRSF, and for example the alternative splice variant, REST4.

[0057] In a particular embodiment, a gene signature of the invention comprises a single-gene that is LIN28. LIN28 is a tumor promoter gene and a key regulator of miRNA processing. LIN28 is normally expressed during early stages of development, and its upregulation has been associated with multiple aggressive cancers. Two-fold upregulation of LIN28 mRNA promotes metastasis in a mouse model of breast cancer (Dangi-Garimella et. al., 2009, EMBO J 28:347-58). LIN28 promotes tumor progression and metastasis by blocking maturation of the let-7 family of tumor suppressing miRNAs. Multiple members of the let-7 family of miRNAs function as important tumor suppressors in breast tumor initiating cells, and serve to temper expression of multiple breast cancer oncogenes, including c-Myc and Ras, both of which were increased upon REST/NRSF knock-down (Yu, et al., 2007, Cell 131:1109-23; Johnson, et al., 2005, Cell 120:635-47; Sampson, et al., 2007, Cancer Res 67:9762-70; Lee, et al., 2007, Genes Dev 21:1025-30).

[0058] In a certain embodiment, a gene signature of the invention comprises one or more of CELF4, CELF5, or CELF6. Without wishing to be bound or limited to any theory or mechanistic explanation, it is shown herein that REST is involved in regulating gene expression of multiple CELF family members, including CELF6, CELF4, and CELF5. All three of these family members are closely related to one another, and are, in many senses, functionally redundant (Barreau et al., 2006, Biochimie, 88:515-525). CELF4-6 all have the ability to enhance inclusion of cTNT exon 5, and CELF4 and CELF6 have also been shown to regulate exon 11 exclusion in the insulin receptor (Barreau et al., 2006, Biochimie, 88:515-525). As set forth herein, overexpression of CELF4 and CELF6 are sufficient to drive REST4 splicing in vitro.

[0059] Thus, the term “gene signature” as used herein, and the term “REST/NRSF gene signature,” refers to a collection of cellular genes showing modified, predominantly increased, gene expression in aggressive breast cancer tumor samples. Gene signatures as provided herein can also comprise genes having decreased expression levels, including for example, PTB (polypyrimidine tract binding protein), and thus the skilled worker will appreciate that gene signatures of the invention are characteristic for differential gene expression. In certain embodiments, gene signatures of the invention comprise increased gene expression for genes whose expression is influenced or regulated by REST/NRSF. Gene signatures of the invention can comprise one, about 2, or about 3, or about 4, or about 6, or about 10, or about 20, or about 30, or about 50, or about 75 or about 100 genes; advantageous but non-limiting embodiments of gene signatures as disclosed herein comprise from about 10 to about 20 genes and includes the genes set forth in Tables 1-4, or 6 herein, generally comprising a sufficient number of genes to identify tumors having a poorer patient survival prognosis or showing a shorter patient disease-free survival metric than tumors of the same type and grade, in certain embodiments wherein said aggressive breast cancer tumors have reduced, altered or aberrant expression of REST/NRSF, including splice variants like REST4, as compared to breast cancer tumor samples having functional REST/NRSF. It will be understood that the degree of differential gene expression for members of the REST/NRSF gene signature will vary from specific gene to gene.

[0060] The term “differential expression” as used herein refers, but is not limited to, differences in gene expression levels between breast cancer tumor cells or samples characterized as “aggressive” (using tumorigenesis, tumor growth, metastasis, and patient survival as the basis for characterization) compared with other breast cancer tumor samples, or alternatively as breast cancer tumor samples lacking functional REST/NRSF (RESTless) and breast cancer tumor cells or samples expressing the wildtype form and amount of REST/NRSF. Gene expression can be detected by assaying cell or tissue sample as mRNA or protein. In addition, the terms as used herein may refer to gene expression of greater or lesser amounts of mRNA and/or protein in aggressive breast cancer tumor samples compared with normal breast tissue. Alternatively, the term as used herein can refer to gene expression of greater or lesser amounts of mRNA and/or protein in RESTless cell/tumor samples than in normal or REST/NRSF+ cell/tissue samples. The control sample can be from healthy tissue from the same patient or a different patient or a control cell line. “Increased expression” as used herein can also refer to increased expression of a gene product (protein) in a RESTless cell/tumor sample as compared to normal and/or REST/NRSF+ samples.

[0061] Detection of a gene signature of the invention can be performed by methods for measuring gene expression levels, including in a non-limiting example conventional microarray techniques described in more detail below. Alternatively, gene expression levels can be detected in certain embodiments by immunoassay or immunohistochemical techniques by detection of the cognate protein products of the members of the gene signature. As used herein with the disclosed methods, gene signatures of this invention identify aggressive subsets of breast cancer tumors (regardless of the status of estrogen receptor expression, the ER+ cohort or ER− cohort) independently of or complementary to other existing predictors of poor prognosis, such as tumor grade, size, patient age and HER2 status. In certain embodiments, the invention provides prognostic indicators of patient disease-free survival times for those patients with tumors otherwise indistinguishable from less aggressive forms of the disease.

[0062] The methods provided herein comprise steps for assaying differential gene expression, either of the genes of the gene signatures provided herein or specific genes, including altered genes such as REST/NRSF and miR-124. In these methods, the assays comprise steps of preparing biomolecules, including DNA, RNA, specifically mRNA or cDNA produced therefrom, or RNA or protein products encoded thereby, for said assays. As used herein, said “preparing biomolecules” or said “prepared biomolecules” will be understood to be the products of isolation, extraction or other preparation methods, including but not limited to in situ and immunohistochemistry methods, biochemical purification methods or molecular biological methods such as amplification, cloning, sequencing and converting mRNA to cDNA. Thus said assays will be understood in the art in many embodiments to consume, at least in part, the tumor sample upon which the assays are performed.

[0063] In other embodiments of the invention, tumors, particularly breast cancer tumors, exhibiting gene signatures of this invention or reduced or altered expression of functional REST/NRSF as detected using the inventive methods thereby identify patients having reduced disease-free survival times and shorter disease-free survival metrics. In certain embodiments, the invention provides methods for detecting alternative splicing events for REST/NRSF mRNA, illustrated in non-limiting example by REST4, wherein the expressed REST/NRSF protein shows a reduced activity level.

[0064] Tissue and tumor samples can be assayed to assess the level of functional REST/NRSF using several methods. These include microarray analysis for detecting the gene signatures disclosed herein. Alternatively, immunohistochemical staining of histological sections from breast cancer tumor samples can be used for staining C-terminal portions of REST/NRSF, alone or together with detection of the REST/NRSF target gene, such as chromogranin-A.

[0065] Post-transcriptional regulation of REST/NRSF occurs during neuronal differentiation and oncogenic transformation wherein protein levels thereof can be significantly reduced in the absence of altered mRNA levels (Ballas et al., 2005, Cell 121:645-57; Guardavaccaro et al., 2008, Nature 452:365-69; Westbrook et al., 2008, Nature, 452:370-4). These observations support the findings set forth herein, that REST/NRSF function cannot be directly measured by its mRNA levels in oligonucleotide arrays. However, the development of gene signatures for loss of REST/NRSF in vitro permitted a class of RESTless breast tumors to be identified as set forth herein.

[0066] Functional loss of the transcription factor and tumor suppressor REST occurs in multiple aggressive cancers due to the inclusion of a truncating exon, termed the N-exon, in REST mRNA (Coulson et al., 2000, Cancer Res., 60:1840-1844; Wagoner et al., 2010, PLoS Genet 6:e1000979). The N-exon contains a premature stop codon, resulting in the truncation of the REST gene product, thus preventing translation of the second half of the DNA binding or the C-terminal repression domains (Palm et al., 1998, J Neurosci, 18:1280-1296). The resulting protein, termed REST4, lacks the ability to bind DNA or repress transcription, making REST4 a non-functional repressor (Lee et al., 2000, Brain Res Mol Brain Res 80:88-98). In this way, alternative splicing of REST mRNA to include the N-exon depletes cells of full-length REST mRNA, as well as functional REST protein. REST4 was originally identified in the hippocampus following kainic acid-induced seizures and has since been identified in neuroblastoma and pheochromocytoma cell lines, suggesting that it may be a neural splice variant of REST (Palm et al., 1999, Brain Res Mol Brain Res, 72:30-39; Shimojo et al., 1999, Mol Cell Biol, 19:6788-6795; Lee et al., 2000, J Mol Neurosci, 15:205-214). In certain neuroendocrine cancers, loss of REST function by alternative splicing results in exogenous expression of neuronal genes implicated in aggressive cancer (Timmusk et al., 1999, J Biol Chem, 274:1078-1084; Desmet et al., 2006, Cell Mol Life Sci, 63:755-759; Garriga-Canut et al., 2006, Nat Neurosci, 9:1382-1387; Thiele et al., 2009, Clin Cancer Res, 15:5962-5967). In small cell neuroendocrine lung cancer cell lines expressing REST4, introduction of full-length REST induces apoptosis, suggesting that this loss of REST function is key to SCLC cell survival in vitro (Gurrola-Diaz et al., 2003, Oncogene, 22:5636-5645).

[0067] It is estimated that 95% of multi-exon genes undergo alternative splicing and at least 50% of these splicing events occur in a cell type-specific manner. The brain is especially enriched in alternative splice variants, driven in part by an array of sequence-specific splicing factors, including neural polypyrimidine tract binding protein (nPTB), neural oncological ventral antigen-1 (NOVA1) and -2 (NOVA2), embryonic lethal abnormal vision (Hu/Elav)-like proteins, CUG binding protein and ETR3-like factor 1 (CELF1), CELF2, and CELF6, many of which are involved in the alternative splicing of neural-specific splice variants (Chen et al., 2009, Nat Rev Mol Cell Biol 10:741-754). Neuronal microRNA miR-124 family members are also known to play a role in neuronal-specific splicing. During neuronal differentiation, miR-124 levels increase following a loss of REST protein (Conaco et al., 2006, Proc Natl Acad Sci USA 103:2422-2427). miR-124 directly binds mRNA encoding the sequence-specific splicing repressor PTB in developing neurons, effectively blocking translation and targeting PTB mRNA for degradation by the RNA-induced silencing complex (Makeyev et al., 2007, Mol Cell, 27:435-448). In non-neural tissues, high levels of PTB protein bind to regulatory elements surrounding exon 10 of nPTB pre-mRNA, resulting in its exclusion from the nPTB transcript and effectively repressing many aspects of neural-specific alternative splicing (Makeyev et al., 2007, Mol Cell, 27:435-448). Inclusion of exon 10 stabilizes the nPTB transcript, resulting in higher levels of the neural-specific splicing protein and neural-specific alternative splicing (Li et al., 2007, Nat Rev Neurosci, 8:819-831).

[0068] Alternative splicing is often regulated by a balance of enhancers and inhibitors of exon inclusion (Barreau et al., 2006, Biochimie, 88:515-525; Chen et al., 2009, Nat Rev Mol Cell Biol 10:741-754). A prime example of this is the dynamic antagonism that exists between PTB and the CELF family of sequence-specific splicing regulators (Charlet et al., 2002, Mol Cell, 9:649-658). CELF1 and CELF2 compete with PTB to bind the polypyrimidine tracts within elements known as muscle specific enhancers (MSEs) and, when bound, activate inclusion of exon 5. Relative levels of endogenous PTB and CELF family members determine whether exon 5 is included or excluded by a process of dynamic antagonism.

[0069] The CELF proteins are members of the BRUNO-like family of RNA-binding proteins (known as CUG-Binding Protein and embryonic lethal abnormal vision type RNA-binding protein 3 family (CELF) proteins), all of which directly bind pre-mRNA with their RNA recognition motifs (RRM) (Barreau et al., 2006, Biochimie, 88:515-525). CELF family members have highly similar structural organization, with two well-conserved N-terminal RRM domains and a third C-terminal RRM domain separated by a poorly conserved linker region. Each of the six identified CELF proteins is able to activate inclusion of exon 5 in cTNT, with many of the members also able to repress exon inclusion in other genes, such as insulin receptor (Barreau et al., 2006, Biochimie, 88:515-525).

[0070] Examples 9 and 10 illustrate that REST regulates numerous aspects of its own alternative splicing by controlling the expression of multiple splicing factors. Loss of REST function results in an increase of miR-124 levels, a decrease of PTB protein levels and an overall increase in REST/NRSF alternative splicing to produce a REST4-encoding transcript. In addition to relieving repression of the N-exon by lowering PTB levels in the cells, loss of REST function also results in the upregulation of CELF4 and CELF6 splicing enhancers. It is shown herein that the exogenous expression of these splicing enhancers is sufficient to increase REST4 splicing. PTB and CELF4/CELF6 dynamically antagonize the inclusion of the REST N-exon in breast tumor cell lines, the balance of which is determined by REST itself.

[0071] In other embodiments, the invention provides methods for detecting functional REST/NRSF expression levels, wherein breast cancer tumors having reduced functional REST/NRSF expression levels identify patients having reduced disease-free survival times and shorter disease-free survival metrics. In the application and practice of these inventive methods, any method known in the art for detecting aberrant or dysfunctional REST/NRSF mRNA species can be used, including allele-specific polymerase chain reaction, nucleotide sequence analysis, specific hybridization assays, or combinations of said methods. In alternative embodiments, REST/NRSF protein is assayed, using methods including but not limited to immunoassay and immunohistochemical (IHC) methods well known in the art. In certain embodiments, these methods are practiced by identifying expression of REST4 in breast cancer tumor samples, wherein said breast cancer tumor samples identify patients having reduced disease-free survival times and shorter disease-free survival metrics. In alternative embodiments, IHC methods are used to detect breast cancer tumors expressing altered REST/NRSF, wherein particular embodiments are directed towards differential detection of amino-terminal and particularly carboxyl-terminal portions of REST/NRSF. In particular examples, methods for immunohistochemical detection of ER− breast cancer tumors deficient for REST/NRSF expression are provided.

[0072] As used herein, a “patient” or “subject” to be treated by the disclosed methods can mean either a human or non-human animal but in certain particular embodiments is a human.

[0073] The term “patient sample” as used herein refers to a cell or tissue sample obtained from a patient (such as a biopsy) or cells collected from in vitro cultured samples; the term can also encompass experimentally derived cell samples.

[0074] As used herein, the term “tumor sample” refers to a diseased or cancerous tissue sample including specifically cell culture samples, experimentally derived samples, biopsy samples and other samples obtained from a subject and comprising a malignant or putatively malignant tumor. In particular, the term refers to a breast cancer sample. The term “tumor” refers to a tissue sample or cells that exhibit a cancerous morphology, express cancer markers, or appear abnormal, or that have been removed from a patient having a clinical diagnosis of cancer. A tumor or “tumorigenic tissue” is not limited to any specific stage of cancer or cancer type, and include in non-limiting examples dysplasia, anaplasia and precancerous lesions. As used herein, the term “disease” or “diseased” refers to any abnormal proliferative pathology, including but not limited to cancer. As used herein, the term “aberrant” refers to abnormal or altered. The term “aggressive” as used herein to describe but is not limited to tumors associated with reduced patient prognosis and/or survival rate, tumors that increase in size and/or metastasize at a faster rate, or tumors of a more severe grade (i.e., higher grades) that other tumor of the same origin. In particular, the invention provides reagents and methods for identifying breast cancer tumor patients having reduced patient survival times, more aggressive tumors and poorer prognosis.

[0075] As used herein, the term “biomolecule(s)” refers to DNA, RNA or protein isolated from a sample (e.g., a tumor sample). Said biomolecules include but are not limited to mRNA, cDNA, miRNA, DNA, nucleic acid fragments, peptides, peptide fragments, partial protein domains, or full-length proteins in either (native or denatured state).

[0076] The practice of the inventive methods can involve established molecular biology procedures, including for example, nucleotide sequence amplification, such as polymerase chain reaction (PCR) and modifications thereof (including for example reverse transcription (RT-PCR), and stem-loop PCR, qPCR, as well as reverse transcription and in vitro transcription. Generally these methods utilize one or a pair of oligonucleotide primers having sequence complimentary to sequences 5′ and 3′ to the sequence of interest. In their use these primers are hybridized to a nucleotide sequence and extended during the practice of PCR amplification using DNA polymerase (preferably using a thermal-stable polymerase such as Taq polymerase). RT-PCR may be performed on mRNA with a specific 5′ primer or random primers and appropriate reverse transcription enzymes such as avian (AMV-RT) or murine (MMLV-RT) reverse transcriptase enzymes to convert RNA to cDNA. Specific, non-limiting examples of such methods for assessing gene expression levels useful in the practice of the inventive methods use reverse transcriptase real time polymerase chain reaction (RT-RTPCR). Use of PCR-based methods including RT-RTPCR advantageously permits rapid, inexpensive and accurate measurement of tens to hundreds of genes simultaneously, and can be used to track gene signatures in breast cancer. As will be understood in the art, reagents for performing many of these analytic methods are commercially available.

[0077] As used herein, the terms “microarray,” “bioarray,” “biochip” and “biochip array” refer to an ordered spatial arrangement of immobilized biomolecular probes arrayed on a solid supporting substrate. Advantageously, the biomolecular probes are immobilized on the solid supporting substrate.

[0078] Gene arrays or microarrays as known in the art are useful in the practice of the methods of this invention. See, for example, DNA MICROARRAYS: A PRACTICAL APPROACH, Schena, ed., Oxford University Press: Oxford, UK, 1999. As used in the methods of the invention, gene arrays or microarrays comprise a solid substrate, preferably within a square of less than about 22 mm by 22 mm on which a plurality of positionally distinguishable polynucleotides are attached at a diameter of about 100-200 microns. These probe sets can be arrayed onto areas of up to 1 to 2 cm², providing for a potential probe count of >30,000 per chip. The solid substrate of the gene arrays can be made out of silicon, glass, plastic or any suitable material. The form of the solid substrate may also vary and may be in the form of beads, fibers or planar surfaces. The sequences of the polynucleotides comprising the array are preferably specific for human mRNA or miRNA. The polynucleotides are attached to the solid substrate using methods known in the art (Schena, Id.) at a density at which hybridization of particular polynucleotides in the array can be positionally distinguished. Preferably, the density of polynucleotides on the substrate is at least 100 different polynucleotides per cm², more preferably at least 300 polynucleotides per cm². In addition, each of the attached polynucleotides comprises at least about 25 to about 50 nucleotides and has a predetermined nucleotide sequence. Target RNA or cDNA preparations are used from tumor samples that are complementary to at least one of the polynucleotide sequences on the array and specifically bind to at least one known position on the solid substrate. Such microarrays and uses thereof are well known in the art (see, for example, Lockhart et al., 2000, Nature 405: 827-36; Schena et al., 1998, Trends Biotechnol. 16: 301-6; Schadt et al., 2000, J. Cell Biochem. 80: 192-202; Li et al., 2001, Bioinformatics 17: 1067-1076; Wu et al., 2001, Appl. Environ. Microbiol. 67: 5780-90; and Kaderali et al., 2002, Bioinformatics 18: 1340-9).

[0079] Two principal array platforms are currently in widespread use, but differ in how the oligonucleotide probes are placed onto the hybridization surface (Lockhart et al., 2000, Id. and Gerhold et al., 1999, Trends Biochem. Sci. 24: 168-73). Schena and Brown pioneered techniques for robotically depositing presynthesized oligonucleotides (typically, PCR-amplified inserts from cDNA clones) onto coated surfaces (Schena et al., 1995, Science 270: 467-70 and Okamoto et al., 2000, Nat. Biotechnol. 18: 438-41). Fodor et al. (1991, Science 251: 767-73) and Lipshutz et al. (1999, Nat. Genet. 21:20-4), on the other hand, utilized photolithographic masking techniques (similar to those used to manufacture silicon chips) to construct polynucleotides one base at a time on preferentially unmasked surfaces containing an oligonucleotide targeted for chain elongation. These two methods generate reproducible probe sets amenable for gene expression profiling and can be used to determine the gene expression profiles of tumor samples when used in accordance with the methods of this invention.

[0080] Biochips, as used in the art, encompass substrates containing arrays or microarrays, preferably ordered arrays and most preferably ordered, addressable arrays, of biological molecules that comprise one member of a biological binding pair. Typically, such arrays are oligonucleotide arrays comprising a nucleotide sequence that is complementary to at least one sequence that may be or is expected to be present in a biological sample. As provided herein, the invention comprises useful microarrays for detecting differential expression in tumor samples, prepared as set forth herein or provided by commercial sources, such as Affymetrix, Inc. (Santa Clara, Calif.), Incyte Inc. (Palo Alto, Calif.) and Research Genetics (Huntsville, Ala.).

[0081] In certain embodiments, said biochip arrays are used to detect differential expression of target mRNA or miRNA species by hybridizing amplification products from experimental and control tissue samples to said array, and detecting hybridization at specific positions on the array having known complementary sequences to specific mRNA or miRNA target(s).

[0082] In certain other embodiments of the diagnostic methods of this invention, expression of the protein product(s) of mRNA targets are detected. In some embodiments, protein products are detected using immunological reagents, examples of which include antibodies, most preferably monoclonal antibodies that recognize said differentially-expressed proteins.

[0083] For the purposes of this invention, the term “immunological reagents” is intended to encompass antisera and antibodies, particularly monoclonal antibodies, as well as fragments thereof (including F(ab), F(ab)₂, F(ab)′ and Fᵥ fragments). Also included in the definition of immunological reagent are chimeric antibodies, humanized antibodies, and recombinantly-produced antibodies and fragments thereof. Immunological methods used in conjunction with the reagents of the invention include direct and indirect (for example, sandwich-type) labeling techniques, immunoaffinity columns, immunomagnetic beads, fluorescence activated cell sorting (FACS), enzyme-linked immunosorbent assays (ELISA), radioimmuno assay (RIA), as well as peroxidase labeled secondary antibodies that detect the primary antibody.

[0084] The immunological reagents of the invention are preferably detectably labeled, most preferably using fluorescent labels that have excitation and emission wavelengths adapted for detection using commercially-available instruments such as and most preferably fluorescence activated cell sorters. Examples of fluorescent labels useful in the practice of the invention include phycoerythrin (PE), fluorescein isothiocyanate (FITC), rhodamine (RH), Texas Red (TX), Cy3, Hoechst 33258, and 4′,6-diamidino-2-phenylindole (DAPI), as well as those labels specifically described in the Examples section. Such labels can be conjugated to immunological reagents, such as antibodies and most preferably monoclonal antibodies using standard techniques (Maino et al., 1995, Cytometry 20: 127-133).

[0085] The invention also provides kits for performing the methods disclosed herein. In certain embodiments, the kits of this invention comprise an antibody specific for the C-terminus of REST/NRSF protein, wherein in particular embodiments said antibody can be a monoclonal antibody, an antisera, or a plurality of antibodies recognizing aberrant or wildtype species of REST/NRSF protein. Optionally included in specific embodiments of the kits of the invention can be instructions for use, as well as secondary antibodies useful inter alia in sandwich assays understood by those in the art. Distinguishingly labeled embodiments of the antibody components of said kits, as well as reagents and methods for labeling said antibodies, are also advantageously-provided components of the kits of the invention.

[0086] In other embodiments, kits of the invention comprise one or plurality of oligonucleotide primers that each specifically hybridize to one or a plurality of the genes identified in Table 1, 2, 3, 4, or 6. In certain embodiments, said oligonucleotides are provided on a solid support, including without limitation chips, microarrays, beads and the like. Optionally included in specific embodiments of the kits of the invention can be instructions for use. Distinguishingly labeled embodiments of the oligonucleotide components of said kits, as well as reagents and methods for labeling said oligonucleotides, are also advantageously-provided components of the kits of the invention.

[0087] In further embodiments, kits of the invention comprise one or plurality of immunological reagents, particularly antibodies that each specifically bind to a protein produced by increased expression of one or a plurality of the genes identified in Table 1, 2, 3, 4 or 6. In certain embodiments, said immunological reagents, particularly antibodies are provided on a solid support, including without limitation chips, microarrays, beads and the like. Optionally included in specific embodiments of the kits of the invention can be instructions for use, as well as secondary antibodies useful inter alia in sandwich assays understood by those in the art. Distinguishingly labeled embodiments of the immunological reagent components of said kits, particularly antibodies, as well as reagents and methods for labeling said antibodies, are also advantageously-provided components of the kits of the invention.

[0088] The kits of the invention are useful for diagnosing or prognosing reduced disease-free survival time in a human with cancer, particularly breast cancer and in specific embodiments aggressive breast cancer in human cancer patients

[0089] Embodiments of the methods of this invention comprising the above-mentioned features are intended to fall within the scope of this invention.

### EXAMPLES

[0090] The Examples that follow are illustrative of specific embodiments of the invention, and various uses thereof They set forth for explanatory purposes only, and are not to be taken as limiting the invention.

### Example 1

### Identification of Gene Signatures in Breast Cancer Cells

[0091] Assays of breast cancer tumor samples for REST/NRSF mRNA levels did not show a decrease in REST/NRSF mRNA, a result that was not expected in view of results of chromosomal loss-of-heterozygosity studies on colon cancer (Westbrook et al., 2005, Cell 121:837-848). Specifically, DNA microarray assays of normal and neoplastic breast tissue were performed as set forth herein, and indicated that REST/NRSF mRNA levels were similar across tumors and normal mammary tissue (as shown FIGS. 1A through 1D). In view of this result, which was inconsistent with expectations from other tumors shown in the art, REST/NRSF function was specifically inhibited experimentally in three cell lines, to determine whether REST/NRSF played any role in the etiology of breast cancer. For these experiments, two human mammary (MCF10a and T47D) and one human embryonic kidney (HEK-293) cell line were experimentally manipulated so that each of these cell lines had REST/NRSF expression reduced (so-called gene “knocked-down” experiments).

[0092] Stable REST/NRSF-knockdown cell lines were generated using a lentivirus-based system, commercially available from Thermo Fisher Dharmacon (Lafayette, Colo.) called SMART Vector shRNA lentiviral particles. Lentiviral particles comprising a nucleic acid encoding a shRNA were used to infect HEK-293 (human embryonic kidney cells), T47D (a breast cancer-derived cell line) and MCF10a (mammary epithelial) cells with either a non-targeting shRNA or an shRNA specific to REST/NRSF (Catalog #S-00500-01 and SH-042194-01-25, respectively) according to the manufacturer's instructions. Briefly, 2×10⁵ cells of each cell type were plated in a 96 well tray overnight, and infected the following morning with 1×10⁶ viral particles in normal medium containing polybrene. Medium was changed after 8 hours of infection. Cells that stably integrated the shRNA into their genome were selected 48 hours after infection using puromycin, and verified for REST/NRSF knockdown via Western Blot analysis with anti-REST specific antibodies (anti-REST antibody was obtained from Millipore, Catalog #07-579, Billerica, Mass.).

[0093] The results of these experiments are shown in FIG. 2A. Breast cancer cells having REST/NRSF knocked down using shRNA grew almost twice as fast as control cells. The increased growth rate observed in breast cancer cells following REST/NRSF knockdown suggested that loss of REST/NRSF produced more aggressive tumor growth. In addition to increased growth rate, reduced expression of REST/NRSF in these cells resulted in increased expression of several genes in all three cell types. These genes were identified by microarray analysis comparing gene expression levels in REST/NRSF knockdown cells with controls expressing the native amounts of REST/NRSF. In these experiments, RNA was extracted from 10⁷ cells from each group of knockdown and control cell lines in duplicate using Trizol Reagent (Invitrogen, Carlsbad, Calif.) according to the manufacturer's instructions. Six DNA microarrays were used (Roche—Nimblegen HG18 60 mer Gene Expression Arrays, Catalog #A4542-00-01) in these experiments, wherein each of the six arrays were dual hybridized with a control and a knockdown aRNA (i.e., amplified RNA) sample from each cell type, in duplicate. Cy3 and Cy5 fluorophores were alternatively used to label the aRNA from control and knockdown cell lines (dye swap) to control any fluorophore-induced effects.

[0094] REST/NRSF target genes that were consistently and robustly elevated in the absence of functional REST/NRSF were identified from these experiments. In determining which genes satisfied the criteria for consistency and robustness, microarray data analyses were performed using GeneSifter microarray analysis software to determine which genes were the most consistently and robustly upregulated upon REST/NRSF knockdown between cell lines. In analyzing these results, genes were scored as being “REST/NRSF target genes” if a two-fold upregulation for each gene in response to REST/NRSF knockdown was detected in at least two of the tested cell lines. This analysis yielded 93 genes, which are listed in Tables 1 and 2.

[0095] Twenty-four genes highly and consistently upregulated two-fold or more upon REST/NRSF knockdown across three cell lines (FIG. 2B) are set out in Table 1.

TABLE 1
REST/NRSF target genes upregulated across three cell lines MCF10a, HEK,
T47D.
(This twenty-four gene subset was termed the “24-gene signature” and is a non-limiting
example of one embodiment of the invention.)

| Gene | | Transcript Accession | |
|---|---|---|---|
| Abbrev. | Gene Name | No.* | SEQ ID NO: |
| AP3B2 | Adaptor-related protein | ENST00000261722 | SEQ ID NO: 1 |
| | complex 3, beta 2 subunit | | |
| BSN | Bassoon (presynaptic | NM_003458 | SEQ ID NO: 2 |
| | cytomatrix protein) | | |
| CHGB | Chromogranin B (secretogranin | ENST00000203005 | SEQ ID NO: 3 |
| | 1) | | |
| CPLX1 | Complexin 1 | ENST00000445104 | SEQ ID NO: 4 |
| CPLX2 | Complexin 2 | NM_006650 | SEQ ID NO: 5 |
| DISP2 | Dispatched homolog 2 | ENST00000254616 | SEQ ID NO: 6 |
| | (Drosophila) | | |
| GOLGA7B | Golgi Autoantigen 7B | ENST00000370602 | SEQ ID NO: 7 |
| HBA1 | Hemoglobin alpha 1 | ENST00000320868 | SEQ ID NO: 8 |
| HBA2 | Hemoglobin alpha 2 | ENST00000251595 | SEQ ID NO: 9 |
| KCNB1 | Potassium voltage-gated | ENST00000371741 | SEQ ID NO: 10 |
| | channel, Shab-related | | |
| | subfamily, member 1 | | |
| MAPK8IP2 | Mitogen-activated protein | ENST00000329492 | SEQ ID NO: 11 |
| | kinase 8 interacting protein 2 | | |
| MMP24 | Matrix metallopeptidase 24 | ENST00000246186 | SEQ ID NO: 12 |
| | (membrane-inserted) | | |
| PGBD5 | PiggyBac transposable element | ENST00000321327 | SEQ ID NO: 13 |
| | derived 5 | | |
| RLTPR | RGD motif, leucine rich repeats, | ENST00000334583 | SEQ ID NO: 14 |
| | tropomodulin domain and | | |
| | proline-rich containing | | |
| RTN2 | Reticulon 2 | ENST00000245923 | SEQ ID NO: 15 |
| RUNDC3A | RUN domain containing 3A | NM_001144825 | SEQ ID NO: 16 |
| SCAMP5 | Secretory carrier membrane | NM_138967 | SEQ ID NO: 17 |
| | protein 5 | | |
| SCGB1D2 | Secretoglobin, family 1D, | ENST00000244926 | SEQ ID NO: 18 |
| | member 2 (Lipophilin B) | | |
| SNAP25 | Synaptosomal-associated | NM_003081 | SEQ ID NO: 19 |
| | protein, 25 kDa | | |
| STMN3 | Stathmin-like 3 | ENST00000358145 | SEQ ID NO: 20 |
| SYP | Synaptophysin | ENST00000263233 | SEQ ID NO: 21 |
| TMEM145 | Transmembrane protein 145 | ENST00000406159 | SEQ ID NO: 22 |
| TMEM198 | Transmembrane protein 198 | ENST00000373883 | SEQ ID NO: 23 |
| VGF | VGF nerve growth factor | ENST00000249330 | SEQ ID NO: 24 |
| | inducible | | |

*Transcript accession numbers beginning “ENST” are from the Ensembl Project database; all other accession numbers are from GenBank

TABLE 2
Genes that are highly and consistently upregulated in 2 cell lines.

| | | | |
|---|---|---|---|
| | | Transcript Accession | |
| Gene Abbrev. | Gene Name | No.* | SEQ ID NO: |

HEK and T47D cell lines:

| | | | |
|---|---|---|---|
| ACTL6B | | ENST00000160382 | SEQ ID NO: 25 |
| BEX1 | brain expressed, X- | ENST00000255533 | SEQ ID NO: 26 |
| | linked 1 | | |
| BRUNOL6 | | ENST00000287202 | SEQ ID NO: 27 |
| C3orf14 | | ENST00000494481 | SEQ ID NO: 28 |
| CAMK2N2 | Homo sapiens | NM_033259 | SEQ ID NO: 29 |
| | calcium/calmodulin- | | |
| | dependent protein | | |
| | kinase II inhibitor 2 | | |
| CECR6 | Cat eye syndrome | ENST00000331437 | SEQ ID NO: 30 |
| | critical region protein 6 | | |
| DIRAS1 | DIRAS family, GTP- | ENST00000321327 | SEQ ID NO: 31 |
| | binding Ras-like 1 | | |
| FGF12 | Fibroblast growth | ENST00000454309 | SEQ ID NO: 32 |
| | factor 12 | | |
| FLJ40125 | Probable protein | ENST00000451287 | SEQ ID NO: 33 |
| | phosphatase 1B-like | | |
| GABRD | Gamma- | ENST00000344115 | SEQ ID NO: 34 |
| | aminobutyric-acid | | |
| | receptor delta subunit | | |
| | precursor (GABA(A) | | |
| | receptor) | | |
| GNAO1 | Guanine nucleotide | ENST00000262493 | SEQ ID NO: 35 |
| | binding protein (G | | |
| | protein), alpha | | |
| | activating activity | | |
| | polypeptide O | | |
| GNG4 | Guanine nucleotide- | ENST00000302505 | SEQ ID NO: 36 |
| | binding protein | | |
| | G(I)/G(S)/G(O) | | |
| | gamma-4 subunit | | |
| HRH3 | Histamine receptor | ENST00000370797 | SEQ ID NO: 37 |
| | H3 | | |
| INSM2 | Insulinoma- | ENST00000307169 | SEQ ID NO: 38 |
| | associated 2 | | |
| KCNK3 | Potassium channel, | ENST00000302909 | SEQ ID NO: 39 |
| | subfamily K, member 3 | | |
| LIN28 | Lin-28 homolog A | ENST00000326279 | SEQ ID NO: 40 |
| | (Zinc finger CCHC | | |
| | domain-containing | | |
| | protein 1) | | |
| NFASC | Homo sapiens | NM_015090 | SEQ ID NO: 41 |
| | neurofascin homolog | | |
| | (chicken) | | |
| OLFM1 | Olfactomedin 1 | ENST00000371793 | SEQ ID NO: 42 |
| PSD | PH and SEC7 | ENST00000020673 | SEQ ID NO: 43 |
| | domain-containing | | |
| | protein 1 | | |
| PTPRH | Protein tyrosine | ENST00000376350 | SEQ ID NO: 44 |
| | phosphatase, receptor | | |
| | type, H | | |
| RAB3C | RAB3C, member Ras | ENST00000381158 | SEQ ID NO: 45 |
| | oncogene family | | |
| RELL2 | Homo sapiens RELT- | NM_173828 | SEQ ID NO: 46 |
| | like 2, transcript | | |
| | variant 1 | | |
| RIPPLY2 | Protein ripply2 | ENST00000369687 | SEQ ID NO: 47 |
| RTBDN | Retbindin | ENST00000322912 | SEQ ID NO: 48 |
| SBK1 | Serine/threonine- | ENST00000341901 | SEQ ID NO: 49 |
| | protein kinase SBK1 | | |
| SCN8A | Sodium channel | ENST00000354534 | SEQ ID NO: 50 |
| | protein type 8 subunit | | |
| | alpha (Sodium | | |
| | channel protein type | | |
| | VIII subunit | | |
| | alpha) (Voltage-gated | | |
| | sodium channel | | |
| | subunit alpha | | |
| | Nav1.6) | | |
| SLC5A5 | Solute carrier family | ENST00000222248 | SEQ ID NO: 51 |
| | 5 (sodium iodide | | |
| | symporter), member 5 | | |
| SLC6A17 | Hypothetical protein | ENST00000450985 | SEQ ID NO: 52 |
| | LOC284462 | | |
| SLC8A2 | Solute carrier family | ENST00000236877 | SEQ ID NO: 53 |
| | 8 (sodium-calcium | | |
| | exchanger), member 2 | | |
| SMPD3 | sphingomyelin | ENST00000219334 | SEQ ID NO: 54 |
| | phosphodiesterase 3, | | |
| | neutral membrane | | |
| SPTBN4 | Spectrin, beta, non- | ENST00000338932 | SEQ ID NO: 55 |
| | erythrocytic 4 | | |
| STX1A | Syntaxin-1A | ENST00000222812 | SEQ ID NO: 56 |
| | (Neuron-specific | | |
| | antigen HPC-1) | | |
| SYN1 | Synapsin-1 (Synapsin | ENST00000263237 | SEQ ID NO: 57 |
| | I) (Brain protein 4.1) | | |
| TCL6 | T-cell | ENST00000341772 | SEQ ID NO: 58 |
| | leukemia/lymphoma 6 | | |
| TMEM151A | Transmembrane | ENST00000327259 | SEQ ID NO: 59 |
| | protein 151A | | |
| TMEM180 | Chromosome 10 open | ENST00000238936 | SEQ ID NO: 60 |
| | reading frame 77 | | |

HEK and MCF10a cell lines:

| | | | |
|---|---|---|---|
| ASPHD1 | Aspartate beta- | ENST00000308748 | SEQ ID NO: 61 |
| | hydroxylase domain- | | |
| | containing protein 1 | | |
| CABP1 | Calcium binding | ENST00000316803 | SEQ ID NO: 62 |
| | protein 1 (calbrain) | | |
| CD24 | CD24 antigen (small | ENST00000382840 | SEQ ID NO: 63 |
| | cell lung carcinoma | | |
| | cluster 4 antigen) | | |
| CDK5R2 | Cyclin-dependent | ENST00000308748 | SEQ ID NO: 64 |
| | kinase 5, regulatory | | |
| | subunit 2 (p39) | | |
| CPNE4 | Copine IV (Copine 8) | ENST00000357965 | SEQ ID NO: 65 |
| CPNE4 | Copine IV (Copine 8) | ENST00000354260\hat{ } | SEQ ID NO: 66 |
| | \hat{ } the most representative | | |
| | transcript of the three | | |
| CPNE4 | Copine IV (Copine 8) | ENST00000356700 | SEQ ID NO: 67 |
| CRABP2 | Cellular retinoic acid | ENST00000368222 | SEQ ID NO: 68 |
| | binding protein 2 | | |
| DNER | Delta and Notch-like | ENST00000341772 | SEQ ID NO: 69 |
| | epidermal growth | | |
| | factor-related | | |
| | receptor Precursor | | |
| DRD2 | Dopamine receptor | ENST00000355319 | SEQ ID NO: 70 |
| | D2 | | |
| FAM155B | Transmembrane | ENST00000252338 | SEQ ID NO: 71 |
| | protein FAM155B | | |
| | (Transmembrane | | |
| | protein 28) (Protein | | |
| | TED) | | |
| FSTL5 | Follistatin-like 5 | ENST00000306100 | SEQ ID NO: 72 |
| MAPK11 | Mitogen-activated | ENST00000330651 | SEQ ID NO: 73 |
| | protein kinase 11 | | |
| MARCH4 | Membrane-associated | ENST00000273067 | SEQ ID NO: 74 |
| | ring finger (C3HC4) 4 | | |
| MEIS3 | MEIS1, myeloid | ENST00000331559 | SEQ ID NO: 75 |
| | ecotropic viral | | |
| | integration site 1 | | |
| | homolog 3 (mouse) | | |
| OGDHL | oxoglutarate | ENST00000355036 | SEQ ID NO: 76 |
| | dehydrogenase-like | | |
| PCBP3 | Poly(RC) binding | ENST00000400310 | SEQ ID NO: 77 |
| | protein 3 | | |
| PHF21B | Homo sapiens PHD | NM_001135862 | SEQ ID NO: 78 |
| | finger protein 21B, | | |
| | transcript variant 2 | | |
| RAB11FIP4 | RAB11 family | ENST00000325874 | SEQ ID NO: 79 |
| | interacting protein 4 | | |
| | (class ii) | | |
| RTN2 | Reticulon 2 | ENST00000245923 | SEQ ID NO: 15 |
| SCN3B | Sodium channel, | ENST00000406159 | SEQ ID NO: 80 |
| | voltage-gated, type | | |
| | III, beta | | |
| SEZ6L2 | seizure related 6 | ENST00000350527 | SEQ ID NO: 81 |
| | homolog (mouse)- | | |
| | like 2 | | |
| SYT14 | Synaptotagmin XIV | ENST00000422431 | SEQ ID NO: 82 |

MCF10a and T47D cell lines:

| | | | |
|---|---|---|---|
| ATL1 | Atlastin-1 (Guanine | ENST00000358385 | SEQ ID NO: 83 |
| | nucleotide-binding | | |
| | protein 3) (GTP- | | |
| | binding protein 3) | | |
| | (GBP-3) (Brain- | | |
| | specific GTP-binding | | |
| | protein) | | |
| CKMT1B | Homo sapiens | NM_020990 | SEQ ID NO: 84 |
| | creatine kinase, | | |
| | mitochondrial 1B, | | |
| | nuclear gene | | |
| | encoding | | |
| | mitochondrial protein | | |
| ENOX1 | Ecto-NOX disulfide- | ENST00000261488 | SEQ ID NO: 85 |
| | thiol exchanger 1 | | |
| | (Constitutive Ecto- | | |
| | NOX) (cNOX) (Candidate | | |
| | growth-related | | |
| | and time keeping | | |
| | constitutive | | |
| | hydroquinone | | |
| | [NADH] | | |
| | oxidase) (cCNOX) (Cell | | |
| | proliferation- | | |
| | inducing gene 38 | | |
| | protein) | | |
| FBXL15 | F-box and leucine- | ENST00000224862 | SEQ ID NO: 86 |
| | rich repeat protein 15 | | |
| GDAP1 | Ganglioside-induced | ENST00000220822 | SEQ ID NO: 87 |
| | differentiation- | | |
| | associated protein 1 | | |
| | (GDAP1) | | |
| LOC283174 | Uncharacterized | ENST00000421172 | SEQ ID NO: 88 |
| | protein LOC283174 | | |
| MAPK8IP1 | Mitogen-activated | ENST00000241014 | SEQ ID NO: 89 |
| | protein kinase 8 | | |
| | interacting protein 1 | | |
| PCDHA6 | Homo sapiens | NM_018909 | SEQ ID NO: 90 |
| | protocadherin alpha | | |
| | 6, transcript variant 1 | | |
| RIMKLA | Ribosomal protein S6 | ENST00000372570 | SEQ ID NO: 91 |
| | modification-like | | |
| | protein A | | |
| SH3GLB1 | SH3-domain GRB2- | ENST00000212369 | SEQ ID NO: 92 |
| | like endophilin B1 | | |
| TRIM9 | Tripartite motif | ENST00000298355 | SEQ ID NO: 93 |
| | protein 9 (RING | | |
| | finger protein 91) | | |

*Transcript accession numbers beginning “ENST” are from the Ensembl Project database; all other accession numbers are from GenBank.

TABLE 3
Example of Single-Gene Gene Signature

| | Gene | Transcript | |
|---|---|---|---|
| Gene Name | Abbreviation | Accession No. | SEQ ID NO |
| LIN28 | Lin-28 | ENST00000326279 | SEQ ID NO: 40 |
| | homolog A | | |
| | (Zinc finger | | |
| | CCHC | | |
| | domain- | | |
| | containing | | |
| | protein 1) | | |

[0096] In addition to the subsets of genes identified from the cell line studies described above, analyses of differential gene expression of a collection of breast cancer tumor samples was also performed. The GSE5460 breast cancer tumor set was divided into two phenotypes: those established as deficient for REST function (RESTless) and those with functional REST (RESTfl). The “24 gene signature” was used to screen the tumors and increased expression of the signature genes was observed for those tumors with the RESTless phenotype; these results are set forth in FIG. 3. These microarray results for gene expression from breast cancer tumor samples showed increased mRNA expression levels (shown in red) of particular cellular genes (the “24 gene signature,” identified on the righthand side of the array) in 129 breast cancer tumors (identified across the top border of the array). Thus, elevated expression of a “gene signature” was correlated with REST-deficient tumors (see Table 4).

[0097] These results were compared with alterations of gene expression found in neuroendocrine tumors found in certain small cell lung cancers, which have been shown to express aberrantly spliced REST/NRSF (Coulson, 2000, Cancer Res. 60:1840-4; Gurrola-Diaz, 2003, Oncogene 22: 5636-5645). These results are shown in FIG. 4, wherein gene expression for several of the genes comprising the 24-gene signature detected in breast cancer cells with reduced REST/NRSF expression are likewise overexpressed in these cells.

[0098] The significance of the gene expression profiles detected as set forth in this example was determined by analyses of tumor progression, disease outcomes and survival from clinical tumor samples, as set forth below.

### Example 2

### Tumors Exhibiting REST/NRSF Gene Signatures have Reduced Patient Survival Rates

[0099] Breast cancer microarrays were queried for those cancers exhibiting a REST/NRSF gene signature as disclosed herein. Microarray data from 211 estrogen receptor positive (ER+) breast cancer patients were screened for the REST/NRSF gene signature (results shown in FIG. 5, wherein the interrogated GSE4922 dataset included 249 tumors of which 211 were ER+). 8% of the ER+ breast cancers were identified as expressing the “24 gene signature” as set forth above. Decoding the clinical details of these samples revealed that this subset of ER+ tumors exhibited a significantly poorer prognosis than tumors that did not express the 24-gene signature. Within this identified data set, tumors with the identified gene signature were lymph node positive 1.5-fold more frequently (45% compared to 30%) than isolates from tumors than gene signature negative tumors. Patients with these tumors also had a 20% decrease in ten-year disease-free survival and these tumors were also more likely to reoccur or metastasize. The 24-gene signature permitted aggressive ER+ tumors to be identified independently of other pathological, histological or other phenotypic basis.

[0100] These prognostic data were further verified by performing a survival analysis comparing gene signature positive (GS+), estrogen receptor positive (ER+) breast cancer patients with those ER+ patients that did not express the 24-gene signature (gene-signature negative, or GS−). FIG. 7 shows a graph of “time of disease-free survival following initial diagnosis” for GS+ versus GS− patients. The graph shows that those patients bearing the 24-gene signature had less time until disease recurrence, a result that was statistically significant (having a p value of 0.020 using logrank statistics). At 24 months post-diagnosis, for example, cancer recurred in only 13% of ER+ patients bearing tumors that did not express this gene signature, compared to 40% recurrence in patients bearing tumors that expressed this gene signature. These results showed that detecting expression of the 24-gene signature identified breast cancer patients having a poorer prognosis.

[0101] Similar results were obtained from survival analyses performed on 200 ER+ lymph node negative (LN−) tumor samples. At 25 months post-diagnosis, patients with ER+ LN− tumors that did not express the 24-gene signature disclosed herein showed a 14% recurrence rate, compared to a 50% recurrence rate for gene signature-positive tumor samples over the same time interval; these results were also statistically-significant (having a p value of 0.057).

[0102] These results were further confirmed in a study using breast cancer tumor set GSE5460, which contains 129 breast cancer tumors. This set of breast cancer tumor samples was interrogated for expression of the 24-gene signature of the invention using microarray screening methods. These results are shown in FIGS. 8A and 8B; microarrays were screened for gene transcripts differentially-expressed between different tumor samples. As with previous tumor collections, a subset of tumors showed overexpression of REST/NRSF target genes.

[0103] In additional experiments, microarray analysis performed on yet another breast cancer tumor sample collection showed that expression of several genes was observed to be significantly upregulated; in these experiments, greater than 85% of those genes were established or putative REST/NRSF target genes. Of the 72 genes whose expression has been most closely associated (p<0.0000007) with breast cancer tumors having poorer prognosis and reduced or dysfunctional REST/NRSF expression (RESTless tumors), 63 were upregulated two-fold or greater upon experimental REST/NRSF knockdown, or contained perfect consensus RE1 sites, or were bound by REST/NRSF in a genome-wide ChIP-Seq screen (Johnson, et al., Science 316: 1497-1502), suggesting that these genes are direct targets of REST/NRSF repression (FIG. 8B).

[0104] Gene Set Enrichment Analysis (GSEA) was performed on this same subset of breast tumors using the 24-gene signature (FIG. 8C). This method compared the expression of a set of experimentally defined REST/NRSF target genes (termed “S”) between RESTless and RESTfl tumors, and assessed the relative enrichment of S in either tumor group. The positive enrichment score obtained from these analyses, along with the low nominal P-value (p<0.001) and false discovery rate q-value (FDR q-value<0.001), were indicative of high level enrichment of REST/NRSF target gene expression in the RESTless tumor subset. GSEA was also performed using an expanded signature consisting of a list of 92 genes set forth in Table 2 that were at least two-fold over-expressed across the average of all three RESTless cell lines. The results showed that the tumors identified as having poorer prognosis and a greater capacity for growth and metastasis expressed gene signatures of the invention with high statistical significance (nominal p-value<0.001, FDR q-value<0.001). These results confirmed the reliability of the association between detecting altered (increased) expression of the genes in the gene signatures of this invention, particularly as set forth in Tables 1 and 2, and aggressive breast cancer (characterized by poorer prognosis and a greater capacity for growth and metastasis), as well as increasing the association and predictive value of alteration in expression of these genes with absent, reduced or dysfunctional REST/NRSF expression.

[0105] Finally, GSEA was also performed using an unbiased list of REST/NRSF targets derived from a ChIPSeq array assay performed in a wholly different cell system, Jurkat T (T cell leukemia) cells (Johnson, et al., Science 316: 1497-1502). ChIPSeq identified REST binding sites in the Jurkat T-cell genome by crosslinking REST to chromatin, fragmenting the REST-crosslinked chromatin and then immunoprecipitating crosslinked fragments with an anti-REST antibody. DNA fragments precipitated with the anti-REST antibody were then de-crosslinked, purified and subjected to direct ultra-high-throughput sequencing to identify REST binding sites. REST target genes identified by this approach were found to be significantly (nominal p-value<0.001, FDR q-value<0.001) enriched in breast cancer tumors identified as having poorer prognosis and a greater capacity for growth and metastasis (FIG. 8C).

[0106] A summary of those genes exhibiting aberrant expression in RESTless tumors as compared to RESTfl samples is provided in Table 4. Genes shown to be differentially expressed (i.e., upregulated or downregulated) between RESTless and RESTfl tumors from breast cancer tumor set GSE5460 encompassed 317 genes (Table 4). To summarize, the genes contained in this Table 4 were identified as differentially expressed based on one or more of the following assays: presence of “24 Gene Signature” 2) comparison data showing a plurality of those genes to be REST targets 3) GSEA analysis using multiple genesets and 4) direct identification and measurement of REST4 splicing transcript in 2 of these 5 tumors (shown below).

TABLE 4
Genes differentially regulated (i.e., upregulated or downregulated) in the
absence of functional REST/NRSF in RESTless breast cancer tumor set GSE5460.

| Gene | | Transcript | |
|---|---|---|---|
| Abbrev. | Gene Name | Accession No.* | SEQ ID NO: |
| IFITM1 | Interferon-induced transmembrane | ENST00000328221 | SEQ ID NO: 94 |
| | protein 1 (Interferon-induced protein | | |
| | 17) (Interferon-inducible protein 9- | | |
| | 27) (Leu-13 antigen) (CD225 | | |
| | antigen) | | |
| AGRN | Agrin precursor | ENST00000345038 | SEQ ID NO: 95 |
| CACNA1C | Voltage-dependent L-type calcium | ENST00000327702 | SEQ ID NO: 96 |
| | channel alpha-1C subunit (Voltage- | | |
| | gated calcium channel alpha subunit | | |
| | Cav1.2) (Calcium channel, L type, | | |
| | alpha-1 polypeptide, isoform 1, | | |
| | cardiac muscle) | | |
| CECR6 | Cat eye syndrome critical region | ENST00000331437 | SEQ ID NO: 30 |
| | protein 6 | | |
| GABRD | Gamma-aminobutyric-acid receptor | ENST00000344115 | SEQ ID NO: 34 |
| | delta subunit precursor (GABA(A) | | |
| | receptor) | | |
| CRMP1 | Dihydropyrimidinase related | ENST00000338991 | SEQ ID NO: 97 |
| | protein-1 (DRP-1) (Collapsin | | |
| | response mediator protein 1) | | |
| | (CRMP-1) | | |
| FXC1 | Mitochondrial import inner | ENST00000254616 | SEQ ID NO: 98 |
| | membrane translocase subunit TIM9 | | |
| | B (Fracture callus protein 1) (FxC1) | | |
| | (TIM10B) (TIMM10B) | | |
| DISP2 | dispatched B | ENST00000267889 | SEQ ID NO: 6 |
| ANKRD29 | ankyrin repeat domain 29 | ENST00000322980 | SEQ ID NO: 99 |
| CD69 | Early activation antigen CD69 | ENST00000228434 | SEQ ID NO: 100 |
| | (Early T-cell activation antigen p60) | | |
| | (GP32/28) (Leu-23) (MLR-3) (EA1) | | |
| | (BL-AC/P26) (Activation inducer | | |
| | molecule) (AIM) | | |
| CUGBP2 | CUG triplet repeat, RNA binding | ENST00000354440 | SEQ ID NO: 101 |
| | protein 2 | | |
| KCNJ6 | G protein-activated inward rectifier | ENST00000288309 | SEQ ID NO: 102 |
| | potassium channel 2 (GIRK2) | | |
| | (Potassium channel, inwardly | | |
| | rectifying, subfamily J, member 6) | | |
| | (Inward rectifier K(+) channel | | |
| | Kir3.2) (KATP-2) (BIR1) | | |
| C19orf30 | Chromosome 19 Open reading | ENST00000317292 | SEQ ID NO: 103 |
| | frame 30 | | |
| ABCC8 | Sulfonylurea receptor 1 | ENST00000302539 | SEQ ID NO: 104 |
| KCNC1 | Potassium voltage-gated channel | ENST00000265969 | SEQ ID NO: 105 |
| | subfamily C member 1 (Voltage- | | |
| | gated potassium channel subunit | | |
| | Kv3.1) (Kv4) (NGK2) | | |
| EHD3 | EH-domain containing protein 3 | ENST00000336339 | SEQ ID NO: 106 |
| BRUNOL4 | bruno-like 4, RNA binding protein | ENST00000361795 | SEQ ID NO: 107 |
| LETM2 | leucine zipper-EF-hand containing | ENST00000297720 | SEQ ID NO: 108 |
| | transmembrane protein 2 | | |
| FGFR1 | Basic fibroblast growth factor | ENST00000326324 | SEQ ID NO: 109 |
| | receptor 1 precursor (EC 2.7.1.112) | | |
| | (FGFR-1) (bFGF-R) (Fms-like | | |
| | tyrosine kinase-2) (c-fgr) | | |
| FGFR1 | Basic fibroblast growth factor | ENST00000356207 | SEQ ID NO: 110 |
| | receptor 1 precursor (EC 2.7.1.112) | | |
| | (FGFR-1) (bFGF-R) (Fms-like | | |
| | tyrosine kinase-2) (c-fgr) | | |
| DNAH9 | Ciliary dynein heavy chain 9 | ENST00000262442 | SEQ ID NO: 111 |
| | (Axonemal beta dynein heavy chain | | |
| | 9) | | |
| ANK1 | Ankyrin 1 (Erythrocyte ankyrin) | ENST00000347528 | SEQ ID NO: 112 |
| | (Ankyrin R) | | |
| CHGB | Secretogranin-1 precursor | ENST00000203005 | SEQ ID NO: 3 |
| | (Secretogranin I) (SgI) | | |
| | (Chromogranin B) (CgB) [Contains: | | |
| | GAWK peptide; CCB peptide] | | |
| CAMK2B | Calcium/calmodulin-dependent | ENST00000324091 | SEQ ID NO: 113 |
| | protein kinase type II beta chain (EC | | |
| | 2.7.1.123) (CaM-kinase II beta | | |
| | chain) (CaM kinase II beta subunit) | | |
| | (CaMK-II beta subunit) | | |
| CACNB2 | Voltage-dependent L-type calcium | ENST00000324631 | SEQ ID NO: 114 |
| | channel beta-2 subunit (CAB2) | | |
| | (Calcium channel, voltage- | | |
| | dependent, beta 2 subunit) | | |
| | (Lambert-Eaton myasthenic | | |
| | syndrome antigen B) (MYSB) | | |
| CHGA | Chromogranin A precursor (CgA) | ENST00000216492 | SEQ ID NO: 115 |
| | (Pituitary secretory protein I) (SP-I) | | |
| | [Contains: Vasostatin-1 (Vasostatin | | |
| | I); Vasostatin-2 (Vasostatin II); EA- | | |
| | 92; ES-43; Pancreastatin; SS-18; | | |
| | WA-8; WE-14; LF-19; AL-11; GV- | | |
| | 19; GR-44; ER-37] | | |
| IGFBP3 | Insulin-like growth factor binding | ENST00000275521 | SEQ ID NO: 116 |
| | protein 3 precursor (IGFBP-3) (IBP- | | |
| | 3) (IGF-binding protein 3) | | |
| KIAA1409 | KIAA1409 | ENST00000256339 | SEQ ID NO: 117 |
| IGJ | Immunoglobulin J chain | ENST00000254801 | SEQ ID NO: 118 |
| C9orf25 | Chromosome 9 Open reading frame | ENST00000359556 | SEQ ID NO: 119 |
| | 25 | | |
| GNB5 | Guanine nucleotide-binding protein | ENST00000358784 | SEQ ID NO: 120 |
| | beta subunit 5 (Transducin beta | | |
| | chain 5) (Gbeta5) | | |
| CHST1 | carbohydrate (keratan sulfate Gal-6) | ENST00000308064 | SEQ ID NO: 121 |
| | sulfotransferase 1 | | |
| KIF9 | Kinesin-like protein KIF9 | ENST00000265529 | SEQ ID NO: 122 |
| HLA-C | HLA class I histocompatibility | ENST00000259866 | SEQ ID NO: 123 |
| | antigen, Cw-18 alpha chain | | |
| | precursor (MHC class I antigen | | |
| | Cw*18) | | |
| GPR158 | G protein-coupled receptor 158 | ENST00000280625 | SEQ ID NO: 124 |
| KIAA0329 | | ENST00000359520 | SEQ ID NO: 125 |
| KDELR3 | ER lumen protein retaining receptor | ENST00000216014 | SEQ ID NO: 126 |
| | 3 (KDEL receptor 3) (KDEL | | |
| | endoplasmic reticulum protein | | |
| | retention receptor 3) | | |
| GDAP1 | Ganglioside-induced differentiation- | ENST00000220822 | SEQ ID NO: 87 |
| | associated protein 1 (GDAP1) | | |
| CELSR3 | Cadherin EGF LAG seven-pass G- | ENST00000164024 | SEQ ID NO: 127 |
| | type receptor 3 precursor (Flamingo | | |
| | homolog 1) (hFmi1) (Multiple | | |
| | epidermal growth factor-like | | |
| | domains 2) (Epidermal growth | | |
| | factor-like 1) | | |
| FABP5 | Fatty acid-binding protein, | ENST00000297258 | SEQ ID NO: 128 |
| | epidermal (E-FABP) (Psoriasis- | | |
| | associated fatty acid-binding protein | | |
| | homolog) (PA-FABP) | | |
| INSM1 | Zinc finger protein IA-1 | ENST00000310227 | SEQ ID NO: 129 |
| | (Insulinoma-associated protein 1) | | |
| EGR4 | Early growth response protein 4 | ENST00000258092 | SEQ ID NO: 130 |
| | (EGR-4) (AT133) | | |
| DHPS | Deoxyhypusine synthase (EC | ENST00000210060 | SEQ ID NO: 131 |
| | 2.5.1.46) (DHS) | | |
| EDIL3 | EGF-like repeats and discoidin I-like | ENST00000296591 | SEQ ID NO: 132 |
| | domains protein 3 precursor | | |
| | (Developmentally regulated | | |
| | endothelial cell locus 1 protein) | | |
| | (Integrin-binding protein DEL1) | | |
| IGHG3 | Ig mu chain C region membrane- | ENST00000361286 | SEQ ID NO: 133 |
| | bound segment | | |
| IGHG3 | Ig mu chain C region membrane- | ENST00000300887 | SEQ ID NO: 134 |
| | bound segment | | |
| IGHG3 | Ig mu chain C region membrane- | ENST00000343496 | SEQ ID NO: 135 |
| | bound segment | | |
| IGHG3 | Ig mu chain C region membrane- | ENST00000251006 | SEQ ID NO: 136 |
| | bound segment | | |
| IGHG3 | Ig mu chain C region membrane- | ENST00000361266 | SEQ ID NO: 137 |
| | bound segment | | |
| FABP5 | Fatty acid-binding protein, | ENST00000300149 | SEQ ID NO: 138 |
| | epidermal (E-FABP) (Psoriasis- | | |
| | associated fatty acid-binding protein | | |
| | homolog) (PA-FABP) | | |
| CACNA2D2 | calcium channel, voltage-dependent, | ENST00000360963 | SEQ ID NO: 139 |
| | alpha 2/delta subunit 2 isoform a | | |
| IGKC | Ig kappa chain V-I region Walker | ENST00000334308 | SEQ ID NO: 140 |
| | precursor | | |
| IGKC | Ig kappa chain V-I region Walker | ENST00000303153 | SEQ ID NO: 141 |
| | precursor | | |
| IGKV4-1 | Ig kappa chain V-IV region | ENST00000283657 | SEQ ID NO: 142 |
| | precursor (Fragment) | | |
| GRM4 | Metabotropic glutamate receptor 4 | ENST00000266007 | SEQ ID NO: 143 |
| | precursor (mGluR4) | | |
| ALPK1 | alpha-kinase 1 | ENST00000177648 | SEQ ID NO: 144 |
| CAMK2D | Calcium/calmodulin-dependent | ENST00000342666 | SEQ ID NO: 145 |
| | protein kinase type II delta chain | | |
| | (EC 2.7.1.123) (CaM-kinase II delta | | |
| | chain) (CaM kinase II delta subunit) | | |
| | (CaMK-II delta subunit) | | |
| KCTD6 | potassium channel tetramerisation | ENST00000355076 | SEQ ID NO: 146 |
| | domain containing 6 | | |
| KCTD6 | potassium channel tetramerisation | ENST00000302803 | SEQ ID NO: 147 |
| | domain containing 6 | | |
| ACD | adrenocortical dysplasia homolog | ENST00000219251 | SEQ ID NO: 148 |
| ATP6V0A1 | Vacuolar proton translocating | ENST00000343619 | SEQ ID NO: 149 |
| | ATPase 116 kDa subunit a isoform 1 | | |
| | (V-ATPase 116-kDa isoform a1) | | |
| | (Clathrin-coated vesicle/synaptic | | |
| | vesicle proton pump 116 kDa | | |
| | subunit) (Vacuolar proton pump | | |
| | subunit 1) (Vacuolar adenosine | | |
| | triphosphatase subunit Ac116) | | |
| GRIA2 | Glutamate receptor 2 precursor | ENST00000264426 | SEQ ID NO: 150 |
| | (GluR-2) (GluR-B) (GluR-K2) | | |
| | (Glutamate receptor ionotropic, | | |
| | AMPA 2) | | |
| CD47 | Leukocyte surface antigen CD47 | ENST00000361309 | SEQ ID NO: 151 |
| | precursor (Antigenic surface | | |
| | determinant protein OA3) (Integrin | | |
| | associated protein) (IAP) (MER6) | | |
| KCNC2 | Shaw-related voltage-gated | ENST00000341669 | SEQ ID NO: 152 |
| | potassium channel protein 2 isoform | | |
| | KV3.2c | | |
| APLP1 | Amyloid-like protein 1 precursor | ENST00000221891 | SEQ ID NO: 153 |
| | (APLP) (APLP-1) [Contains: C30] | | |
| DMRTC1 | DMRT-like family C1 | ENST00000334036 | SEQ ID NO: 154 |
| DMRTC1 | DMRT-like family C1 | ENST00000334472 | SEQ ID NO: 155 |
| GPM6A | Neuronal membrane glycoprotein | ENST00000280187 | SEQ ID NO: 156 |
| | M6-a (M6a) | | |
| GPM6A | Neuronal membrane glycoprotein | ENST00000359631 | SEQ ID NO: 157 |
| | M6-a (M6a) | | |
| DPYSL3 | Dihydropyrimidinase related | ENST00000343218 | SEQ ID NO: 158 |
| | protein-3 (DRP-3) (Unc-33-like | | |
| | phosphoprotein) (ULIP protein) | | |
| | (Collapsin response mediator protein | | |
| | 4) (CRMP-4) | | |
| KCNJ3 | G protein-activated inward rectifier | ENST00000295101 | SEQ ID NO: 159 |
| | potassium channel 1 (GIRK1) | | |
| | (Potassium channel, inwardly | | |
| | rectifying, subfamily J, member 3) | | |
| | (Inward rectifier K(+) channel | | |
| | Kir3.1) | | |
| GRIA1 | Glutamate receptor 1 precursor | ENST00000285900 | SEQ ID NO: 160 |
| | (GluR-1) (GluR-A) (GluR-K1) | | |
| | (Glutamate receptor ionotropic, | | |
| | AMPA 1) | | |
| CHPT1 | choline phosphotransferase 1 | ENST00000229266 | SEQ ID NO: 161 |
| ASCL1 | Achaete-scute homolog 1 (HASH1) | ENST00000266744 | SEQ ID NO: 162 |
| CEACAM5 | Carcinoembryonic antigen-related | ENST00000221992 | SEQ ID NO: 163 |
| | cell adhesion molecule 5 precursor | | |
| | (Carcinoembryonic antigen) (CEA) | | |
| | (Meconium antigen 100) (CD66e | | |
| | antigen) | | |
| BEX1 | brain expressed, X-linked 1 | ENST00000255533 | SEQ ID NO: 26 |
| KCNH2 | Potassium voltage-gated channel | ENST00000262186 | SEQ ID NO: 164 |
| | subfamily H member 2 (Voltage- | | |
| | gated potassium channel subunit | | |
| | Kv11.1) (Ether-a-go-go related gene | | |
| | potassium channel 1) (H-ERG) | | |
| | (Erg1) (Ether-a-go-go related | | |
| | protein 1) (Eag related protein 1) | | |
| | (eag homolog) | | |
| CPNE4 | Copine IV (Copine 8) | ENST00000357965 | SEQ ID NO: 65 |
| CPNE4 | Copine IV (Copine 8) | ENST00000354260 | SEQ ID NO: 66 |
| CPNE4 | Copine IV (Copine 8) | ENST00000356700 | SEQ ID NO: 67 |
| ATP2A2 | Sarcoplasmic/endoplasmic reticulum | ENST00000313432 | SEQ ID NO: 165 |
| | calcium ATPase 2 (EC 3.6.3.8) | | |
| | (Calcium pump 2) (SERCA2) (SR | | |
| | Ca(2+)-ATPase 2) (Calcium- | | |
| | transporting ATPase sarcoplasmic | | |
| | reticulum type, slow twitch skeletal | | |
| | muscle isoform) (Endoplasmic | | |
| | reticulum class 1/2 Ca(2+) ATPase) | | |
| ALDH2 | Aldehyde dehydrogenase, | ENST00000261733 | SEQ ID NO: 166 |
| | mitochondrial precursor (EC 1.2.1.3) | | |
| | (ALDH class 2) (ALDHI) (ALDH- | | |
| | E2) | | |
| INPP1 | Inositol polyphosphate 1- | ENST00000322522 | SEQ ID NO: 167 |
| | phosphatase (EC 3.1.3.57) (IPPase) | | |
| | (IPP) | | |
| CPB1 | Carboxypeptidase B precursor (EC | ENST00000282957 | SEQ ID NO: 168 |
| | 3.4.17.2) (Pancreas-specific protein) | | |
| | (PASP) | | |
| CA11 | Carbonic anhydrase-related protein | ENST00000084798 | SEQ ID NO: 169 |
| | 2 precursor (CARP-2) (CA-RP II) | | |
| | (CA-XI) (Carbonic anhydrase- | | |
| | related protein 11) (CARP XI) (CA- | | |
| | RP XI) (UNQ211/PRO237) | | |
| BCL2L12 | Bcl-2 related proline-rich protein | ENST00000246785 | SEQ ID NO: 170 |
| | (Bcl-2-like 12 protein) | | |
| ECT2 | ECT2 protein (Epithelial cell | ENST00000232458 | SEQ ID NO: 171 |
| | transforming sequence 2 oncogene) | | |
| EEF1A2 | Elongation factor 1-alpha 2 (EF-1- | ENST00000217182 | SEQ ID NO: 172 |
| | alpha-2) (Elongation factor 1 A-2) | | |
| | (eEF1A-2) (Statin S1) | | |
| L1CAM | Neural cell adhesion molecule L1 | ENST00000361699 | SEQ ID NO: 173 |
| | precursor (N-CAM L1) (CD171 | | |
| | antigen) | | |
| DNAJC6 | DnaJ (Hsp40) homolog, subfamily | ENST00000263441 | SEQ ID NO: 174 |
| | C, member 6 | | |
| HS2ST1 | heparan sulfate 2-O-sulfotransferase 1 | ENST00000284064 | SEQ ID NO: 175 |
| CNN3 | Calponin-3 (Calponin, acidic | ENST00000281863 | SEQ ID NO: 176 |
| | isoform) | | |
| ATRNL1 | attractin-like 1 | ENST00000355044 | SEQ ID NO: 177 |
| ATRNL1 | attractin-like 1 | ENST00000303745 | SEQ ID NO: 178 |
| DPYSL4 | Dihydropyrimidinase related | ENST00000338492 | SEQ ID NO: 179 |
| | protein-4 (DRP-4) (Collapsin | | |
| | response mediator protein 3) | | |
| | (CRMP-3) (UNC33-like | | |
| | phosphoprotein 4) (ULIP4 protein) | | |
| EFNA4 | Ephrin-A4 precursor (EPH-related | ENST00000271938 | SEQ ID NO: 180 |
| | receptor tyrosine kinase ligand 4) | | |
| | (LERK-4) | | |
| FAM20B | Protein FAM20B precursor | ENST00000263733 | SEQ ID NO: 181 |
| CHI3L1 | Chitinase-3 like protein 1 precursor | ENST00000255409 | SEQ ID NO: 182 |
| | (Cartilage glycoprotein-39) (GP-39) | | |
| | (39 kDa synovial protein) (HCgp- | | |
| | 39) (YKL-40) | | |
| GNG4 | Guanine nucleotide-binding protein | ENST00000302505 | SEQ ID NO: 36 |
| | G(I)/G(S)/G(O) gamma-4 subunit | | |
| CNR1 | Cannabinoid receptor 1 (CB1) (CB- | ENST00000303726 | SEQ ID NO: 183 |
| | R) (CANN6) | | |
| SLC22A17 | Brain-type organic cation transporter | ENST00000206544 | SEQ ID NO: 184 |
| | (Solute carrier family 22, member | | |
| | 17) | | |
| NOVA1 | RNA-binding protein Nova-1 | ENST00000267422 | SEQ ID NO: 185 |
| | (Neuro-oncological ventral antigen | | |
| | 1) (Onconeural ventral antigen-1) | | |
| | (Paraneoplastic Ri antigen) (Ventral | | |
| | neuron-specific protein 1) | | |
| POLE2 | DNA polymerase epsilon subunit B | ENST00000216367 | SEQ ID NO: 186 |
| | (EC 2.7.7.7) (DNA polymerase II | | |
| | subunit B) | | |
| TRIM9 | Tripartite motif protein 9 (RING | ENST00000298355 | SEQ ID NO: 93 |
| | finger protein 91) | | |
| USP25 | Ubiquitin carboxyl-terminal | ENST00000285681 | SEQ ID NO: 187 |
| | hydrolase 25 (EC 3.1.2.15) | | |
| | (Ubiquitin thiolesterase 25) | | |
| | (Ubiquitin-specific processing | | |
| | protease 25) (Deubiquitinating | | |
| | enzyme 25) (USP on chromosome | | |
| | 21) | | |
| NET1 | Neuroepithelial cell transforming | ENST00000308281 | SEQ ID NO: 188 |
| | gene 1 protein (p65 Net1 proto- | | |
| | oncogene) (Rho guanine nucleotide | | |
| | exchange factor 8) | | |
| NTSR2 | Neurotensin receptor type 2 (NT-R- | ENST00000306928 | SEQ ID NO: 189 |
| | 2) (Levocabastine-sensitive | | |
| | neurotensin receptor) (NTR2 | | |
| | receptor) | | |
| NTN2L | Netrin-2 like protein precursor | ENST00000293973 | SEQ ID NO: 190 |
| USP6NL | USP6 N-terminal like protein | ENST00000277575 | SEQ ID NO: 191 |
| | (Related to the N terminus of tre) | | |
| | (RN-tre) | | |
| QDPR | Dihydropteridine reductase (EC | ENST00000281243 | SEQ ID NO: 192 |
| | 1.5.1.34) (HDHPR) (Quinoid | | |
| | dihydropteridine reductase) | | |
| MAPRE3 | Microtubule-associated protein | ENST00000233121 | SEQ ID NO: 193 |
| | RP/EB family member 3 (End- | | |
| | binding protein 3) (EB3) (EB1 | | |
| | protein family member 3) (EBF3) | | |
| | (RP3) | | |
| SLC5A6 | Sodium-dependent multivitamin | ENST00000310574 | SEQ ID NO: 194 |
| | transporter (Na(+)-dependent | | |
| | multivitamin transporter) | | |
| PTGER4 | Prostaglandin E2 receptor, EP4 | ENST00000302472 | SEQ ID NO: 195 |
| | subtype (Prostanoid EP4 receptor) | | |
| | (PGE receptor, EP4 subtype) | | |
| RIPK4 | Serine/threonine-protein kinase | ENST00000352483 | SEQ ID NO: 196 |
| | RIPK4 (EC 2.7.1.37) (Receptor- | | |
| | interacting serine-threonine kinase | | |
| | 4) (Ankyrin repeat domain protein | | |
| | 3) (PKC-delta-interacting protein | | |
| | kinase) | | |
| SEZ6L | Seizure 6-like protein precursor | ENST00000248933 | SEQ ID NO: 197 |
| NOL4 | Nucleolar protein 4 (Nucleolar- | ENST00000261592 | SEQ ID NO: 198 |
| | localized protein) (HRIHFB2255) | | |
| TPH1 | Tryptophan 5-hydroxylase 1 (EC | ENST00000250018 | SEQ ID NO: 199 |
| | 1.14.16.4) (Tryptophan 5- | | |
| | monooxygenase 1) | | |
| NEFH | Neurofilament triplet H protein (200 kDa | ENST00000310624 | SEQ ID NO: 200 |
| | neurofilament protein) | | |
| | (Neurofilament heavy polypeptide) | | |
| | (NF-H) | | |
| TSG101 | Tumor susceptibility gene 101 | ENST00000251968 | SEQ ID NO: 201 |
| | protein | | |
| SYT4 | Synaptotagmin-4 (Synaptotagmin | ENST00000255224 | SEQ ID NO: 202 |
| | IV) (SytIV) | | |
| SCGN | Secretagogin | ENST00000190668 | SEQ ID NO: 203 |
| NRXN3 | Neurexin 3-alpha precursor | ENST00000330071 | SEQ ID NO: 204 |
| | (Neurexin III-alpha) | | |
| SEMA6D | semaphorin 6D isoform 6 precursor | ENST00000316364 | SEQ ID NO: 205 |
| GABBR1 | Gamma-aminobutyric acid type B | ENST00000259937 | SEQ ID NO: 206 |
| | receptor, subunit 1 precursor | | |
| | (GABA-B receptor 1) (GABA-B- | | |
| | R1) (Gb1) | | |
| SCG3 | Secretogranin-3 precursor | ENST00000220478 | SEQ ID NO: 207 |
| | (Secretogranin III) (SgIII) | | |
| | (UNQ2502/PRO5990) | | |
| SLC4A4 | solute carrier family 4, sodium | ENST00000264485 | SEQ ID NO: 208 |
| | bicarbonate cotransporter, member 4 | | |
| SYTL5 | Synaptotagmin-like protein 5 | ENST00000357972 | SEQ ID NO: 209 |
| SYTL5 | Synaptotagmin-like protein 5 | ENST00000297875 | SEQ ID NO: 210 |
| TRPA1 | Transient receptor potential cation | ENST00000262209 | SEQ ID NO: 211 |
| | channel subfamily A member 1 | | |
| | (Ankyrin-like with transmembrane | | |
| | domains protein 1) (Transformation | | |
| | sensitive-protein p120) | | |
| MADD | MAP-kinase activating death | ENST00000311027 | SEQ ID NO: 212 |
| | domain-containing protein isoform g | | |
| SNX5 | Sorting nexin 5 | ENST00000341703 | SEQ ID NO: 213 |
| STX1A | Syntaxin-1A (Neuron-specific | ENST00000222812 | SEQ ID NO: 56 |
| | antigen HPC-1) | | |
| NAPB | Beta-soluble NSF attachment | ENST00000246011 | SEQ ID NO: 214 |
| | protein (SNAP-beta) (N- | | |
| | ethylmaleimide-sensitive factor | | |
| | attachment protein, beta) | | |
| SEZ6L2 | seizure related 6 homolog (mouse)- | ENST00000350527 | SEQ ID NO: 81 |
| | like 2 | | |
| SYN1 | Synapsin-1 (Synapsin I) (Brain | ENST00000263237 | SEQ ID NO: 57 |
| | protein 4.1) | | |
| PCSK1 | Neuroendocrine convertase 1 | ENST00000311106 | SEQ ID NO: 215 |
| | precursor (EC 3.4.21.93) (NEC 1) | | |
| | (PC1) (Prohormone convertase 1) | | |
| | (Proprotein convertase 1) | | |
| PCLO | Piccolo protein (Aczonin) | ENST00000333891 | SEQ ID NO: 216 |
| RIMS2 | Regulating synaptic membrane | ENST00000329869 | SEQ ID NO: 217 |
| | exocytosis protein 2 (Rab3- | | |
| | interacting molecule 2) (RIM 2) | | |
| SYT7 | Synaptotagmin-7 (Synaptotagmin | ENST00000263846 | SEQ ID NO: 218 |
| | VII) (SytVII) | | |
| PARP6 | poly (ADP-ribose) polymerase | ENST00000287196 | SEQ ID NO: 219 |
| | family, member 6 | | |
| SYP | Synaptophysin (Major synaptic | ENST00000263233 | SEQ ID NO: 21 |
| | vesicle protein p38) | | |
| TNFAIP8 | tumor necrosis factor, alpha-induced | ENST00000274456 | SEQ ID NO: 220 |
| | protein 8 | | |
| MAPK8IP2 | C-jun-amino-terminal kinase | ENST00000329492 | SEQ ID NO: 11 |
| | interacting protein 2 (JNK- | | |
| | interacting protein 2) (JIP-2) (JNK | | |
| | MAP kinase scaffold protein 2) | | |
| | (Islet-brain-2) (IB-2) (Mitogen- | | |
| | activated protein kinase 8- | | |
| | interacting protein 2) | | |
| UNC13A | Unc-13 homolog A (Munc13-1) | ENST00000252773 | SEQ ID NO: 221 |
| | (Fragment) | | |
| RAB3A | Ras-related protein Rab-3A | ENST00000222256 | SEQ ID NO: 222 |
| PMS2L8 | PREDICTED: similar to PMS4 | ENST00000222396 | SEQ ID NO: 223 |
| | homolog mismatch repair protein- | | |
| | human | | |
| MCF2L | Guanine nucleotide exchange factor | ENST00000347957 | SEQ ID NO: 224 |
| | DBS (DBL's big sister) (MCF2 | | |
| | transforming sequence-like protein) | | |
| | (Fragment) | | |
| PDE8A | High-affinity cAMP-specific and | ENST00000310298 | SEQ ID NO: 225 |
| | IBMX-insensitive 3′,5′-cyclic | | |
| | phosphodiesterase 8A (EC 3.1.4.17) | | |
| ROBO2 | Roundabout homolog 2 precursor | ENST00000332191 | SEQ ID NO: 226 |
| RASA4 | Ras GTPase-activating protein 4 | ENST00000306682 | SEQ ID NO: 227 |
| | (RasGAP-activating-like protein 2) | | |
| | (Calcium-promoted Ras inactivator) | | |
| ERCC6 | DNA excision repair protein ERCC- | ENST00000342592 | SEQ ID NO: 228 |
| | 6 (Cockayne syndrome protein CSB) | | |
| RASA4 | Ras GTPase-activating protein 4 | ENST00000262940 | SEQ ID NO: 229 |
| | (RasGAP-activating-like protein 2) | | |
| | (Calcium-promoted Ras inactivator) | | |
| PARD6A | Partitioning defective-6 homolog | ENST00000219255 | SEQ ID NO: 230 |
| | alpha (PAR-6 alpha) (PAR-6A) | | |
| | (PAR-6) (PAR6C) (Tax interaction | | |
| | protein 40) (TIP-40) | | |
| OGDHL | oxoglutarate dehydrogenase-like | ENST00000355036 | SEQ ID NO: 76 |
| SMPD3 | sphingomyelin phosphodiesterase 3, | ENST00000219334 | SEQ ID NO: 54 |
| | neutral membrane | | |
| SCN1B | Sodium channel beta-1 subunit | ENST00000262631 | SEQ ID NO: 231 |
| | precursor | | |
| NPY5R | Neuropeptide Y receptor type 5 | ENST00000338566 | SEQ ID NO: 232 |
| | (NPY5-R) (NPY-Y5 receptor) (Y5 | | |
| | receptor) (NPYY5) | | |
| NRBF2 | nuclear receptor binding factor 2 | ENST00000277746 | SEQ ID NO: 233 |
| PCDHAC2 | Protocadherin alpha 13 precursor | ENST00000289630 | SEQ ID NO: 234 |
| | (PCDH-alpha13) | | |
| PCDHB3 | Protocadherin beta 3 precursor | ENST00000231130 | SEQ ID NO: 235 |
| | (PCDH-beta3) | | |
| NTS | Neurotensin/neuromedin N | ENST00000256010 | SEQ ID NO: 236 |
| | precursor [Contains: Large | | |
| | neuromedin N (NmN-125); | | |
| | Neuromedin N (NmN) (NN); | | |
| | Neurotensin (NT); Tail peptide] | | |
| WDR17 | WD-repeat protein 17 | ENST00000280190 | SEQ ID NO: 237 |
| TERF2IP | Telomeric repeat binding factor 2 | ENST00000300086 | SEQ ID NO: 238 |
| | interacting protein 1 (TRF2- | | |
| | interacting telomeric protein Rap1) | | |
| | (hRap1) | | |
| PODXL | Podocalyxin-like protein 1 precursor | ENST00000322985 | SEQ ID NO: 239 |
| RIMS4 | Regulating synaptic membrane | ENST00000217067 | SEQ ID NO: 240 |
| | exocytosis protein 4 (Rab-3 | | |
| | interacting molecule 4) (RIM 4) | | |
| | (RIM4 gamma) | | |
| PODXL2 | endoglycan | ENST00000342480 | SEQ ID NO: 241 |
| MGLL | Monoglyceride lipase (EC 3.1.1.23) | ENST00000265052 | SEQ ID NO: 242 |
| | (HU-K5) (Lysophospholipase | | |
| | homolog) (Lysophospholipase-like) | | |
| LRP2 | Low-density lipoprotein receptor- | ENST00000263816 | SEQ ID NO: 243 |
| | related protein 2 precursor (Megalin) | | |
| | (Glycoprotein 330) (gp330) | | |
| TMEM22 | transmembrane protein 22 | ENST00000306215 | SEQ ID NO: 244 |
| PPM1E | protein phosphatase 1E | ENST00000308249 | SEQ ID NO: 245 |
| PTPRN2 | Receptor-type tyrosine-protein | ENST00000331938 | SEQ ID NO: 246 |
| | phosphatase N2 precursor (EC | | |
| | 3.1.3.48) (R-PTP-N2) (Islet cell | | |
| | autoantigen related protein) | | |
| | (ICAAR) (IAR) (Phogrin) | | |
| UBE2E3 | Ubiquitin-conjugating enzyme E2 | ENST00000305934 | SEQ ID NO: 247 |
| | E3 (EC 6.3.2.19) (Ubiquitin-protein | | |
| | ligase E3) (Ubiquitin carrier protein | | |
| | E3) (Ubiquitin-conjugating enzyme | | |
| | E2-23 kDa) (UbcH9) | | |
| PAPPA | Pappalysin-1 precursor (EC | ENST00000328252 | SEQ ID NO: 248 |
| | 3.4.24.79) (Pregnancy-associated | | |
| | plasma protein-A) (PAPP-A) | | |
| | (Insulin-like growth factor- | | |
| | dependent IGF binding protein-4 | | |
| | protease) (IGF-dependent IGFBP-4 | | |
| | protease) (IGFBP-4ase) | | |
| RAB23 | Ras-related protein Rab-23 | ENST00000317483 | SEQ ID NO: 249 |
| | (HSPC137) | | |
| RAB23 | Ras-related protein Rab-23 | ENST00000344445 | SEQ ID NO: 250 |
| | (HSPC137) | | |
| PPFIA3 | Liprin-alpha 3 (Protein tyrosine | ENST00000334186 | SEQ ID NO: 251 |
| | phosphatase receptor type f | | |
| | polypeptide-interacting protein alpha | | |
| | 3) (PTPRF-interacting protein alpha | | |
| | 3) | | |
| TEAD2 | Transcriptional enhancer factor | ENST00000311227 | SEQ ID NO: 252 |
| | TEF-4 (TEA domain family member | | |
| | 2) (TEAD-2) | | |
| SOX9 | Transcription factor SOX-9 | ENST00000245479 | SEQ ID NO: 253 |
| IL4I1 | Nuclear pore glycoprotein p62 (62 kDa | ENST00000352066 | SEQ ID NO: 254 |
| | nucleoporin) | | |
| IL4I1 | Nuclear pore glycoprotein p62 (62 kDa | ENST00000345498 | SEQ ID NO: 255 |
| | nucleoporin) | | |
| SLC15A4 | solute carrier family 15, member 4 | ENST00000266771 | SEQ ID NO: 256 |
| STMN3 | Stathmin 3 (SCG10-like protein) | ENST00000358145 | SEQ ID NO: 20 |
| PLCD4 | phospholipase C, delta 4 | ENST00000251959 | SEQ ID NO: 257 |
| MAGEA12 | Melanoma-associated antigen 12 | ENST00000276344 | SEQ ID NO: 258 |
| | (MAGE-12 antigen) (MAGE12F) | | |
| SCG2 | Secretogranin-2 precursor | ENST00000305409 | SEQ ID NO: 259 |
| | (Secretogranin II) (SgII) | | |
| | (Chromogranin C) [Contains: | | |
| | Secretoneurin (SN)] | | |
| TFRC | Transferrin receptor protein 1 | ENST00000360110 | SEQ ID NO: 260 |
| | (TfR1) (TR) (TfR) (Trfr) (CD71 | | |
| | antigen) (T9) (p90) | | |
| TFRC | Transferrin receptor protein 1 | ENST00000265238 | SEQ ID NO: 261 |
| | (TfR1) (TR) (TfR) (Trfr) (CD71 | | |
| | antigen) (T9) (p90) | | |
| RAB39B | Ras-related protein Rab-39B | ENST00000286430 | SEQ ID NO: 262 |
| TSPYL4 | Testis-specific Y-encoded-like | ENST00000336786 | SEQ ID NO: 263 |
| | protein 4 (TSPY-like 4) | | |
| PDE4B | cAMP-specific 3′,5′-cyclic | ENST00000329654 | SEQ ID NO: 264 |
| | phosphodiesterase 4B (EC 3.1.4.17) | | |
| | (DPDE4) (PDE32) | | |
| PIGK | GPI-anchor transamidase precursor | ENST00000271047 | SEQ ID NO: 265 |
| | (EC 3.—.—.—) (GPI transamidase) | | |
| | (Phosphatidylinositol-glycan | | |
| | biosynthesis, class K protein) (PIG- | | |
| | K) (hGPI8) | | |
| PERP | PERP, TP53 apoptosis effector | ENST00000265603 | SEQ ID NO: 266 |
| TCF7L2 | Transcription factor 7-like 2 (HMG | ENST00000355717 | SEQ ID NO: 267 |
| | box transcription factor 4) (T-cell- | | |
| | specific transcription factor 4) (TCF- | | |
| | 4) (hTCF-4) | | |
| QKI | quaking homolog, KH domain RNA | ENST00000361752 | SEQ ID NO: 268 |
| | binding isoform HQK-5 | | |
| MCL1 | Induced myeloid leukemia cell | ENST00000271648 | SEQ ID NO: 269 |
| | differentiation protein Mcl-1 | | |
| NMNAT2 | Nicotinamide mononucleotide | ENST00000287713 | SEQ ID NO: 270 |
| | adenylyltransferase 2 (EC 2.7.7.1) | | |
| | (NMN adenylyltransferase 2) | | |
| RGS1 | Regulator of G-protein signaling 1 | ENST00000204113 | SEQ ID NO: 271 |
| | (RGS1) (Early response protein | | |
| | 1R20) (B-cell activation protein | | |
| | BL34) | | |
| NAV1 | neuron navigator 1 | ENST00000358222 | SEQ ID NO: 272 |
| RAB7L1 | Ras-related protein Rab-7L1 (Rab-7 | ENST00000235932 | SEQ ID NO: 273 |
| | like protein 1) | | |
| RGS7 | Regulator of G-protein signaling 7 | ENST00000331110 | SEQ ID NO: 274 |
| | (RGS7) | | |
| YES1 | Proto-oncogene tyrosine-protein | ENST00000314574 | SEQ ID NO: 275 |
| | kinase YES (EC 2.7.1.112) (p61- | | |
| | YES) (C-YES) | | |
| ZFP36L1 | Butyrate response factor 1 (TIS11B | ENST00000336440 | SEQ ID NO: 276 |
| | protein) (EGF-response factor 1) | | |
| | (ERF-1) | | |
| ZCWPW1 | Zinc finger CW-type PWWP | ENST00000358428 | SEQ ID NO: 277 |
| | domain protein 1 | | |
| YAP1 | 65 kDa Yes-associated protein | ENST00000345877 | SEQ ID NO: 278 |
| | (YAP65) | | |
| APCDD1L | Homo sapiens adenomatosis | BC101758 | SEQ ID NO: 279 |
| | polyposis coli down-regulated 1-like | | |
| | (cDNA clone MGC: 126807 | | |
| | IMAGE: 8069264), complete cds | | |
| ARL4C | Homo sapiens ADP-ribosylation | NM_005737 | SEQ ID NO: 280 |
| | factor-like 4C | | |
| ATG9B | Homo sapiens ATG9 autophagy | NM_173681 | SEQ ID NO: 281 |
| | related 9 homolog B (S cerevisiae) | | |
| GOLGA7B | Homo sapiens Golgi autoantigen, | NM_001010917 | SEQ ID NO: 282 |
| | golgin subfamily a, 7B | | |
| C12orf34 | Homo sapiens chromosome 12 open | NM_032829 | SEQ ID NO: 283 |
| | reading frame 34 | | |
| C16orf57 | Homo sapiens chromosome 16 open | NM_024598 | SEQ ID NO: 284 |
| | reading frame 57 | | |
| C1orf173 | Homo sapiens chromosome 1 open | NM_001002912 | SEQ ID NO: 285 |
| | reading frame 173 | | |
| CADM2 | Homo sapiens cell adhesion | NM_153184 | SEQ ID NO: 286 |
| | molecule 2 | | |
| CADPS | Homo sapiens Ca++-dependent | NM_003716 | SEQ ID NO: 287 |
| | secretion activator, transcript variant 1 | | |
| CALM1 | Homo sapiens calmodulin 1 | NM_006888 | SEQ ID NO: 288 |
| | (phosphorylase kinase, delta) | | |
| CAMK2N2 | Homo sapiens calcium/calmodulin- | NM_033259 | SEQ ID NO: 29 |
| | dependent protein kinase II inhibitor 2 | | |
| CARTPT | Homo sapiens CART prepropeptide | NM_004291 | SEQ ID NO: 289 |
| CCDC109B | Homo sapiens coiled-coil domain | NM_017918 | SEQ ID NO: 290 |
| | containing 109B | | |
| CCDC64 | Homo sapiens coiled-coil domain | NM_207311 | SEQ ID NO: 291 |
| | containing 64 | | |
| CD55 | Homo sapiens CD55 molecule, | NM_001114752 | SEQ ID NO: 292 |
| | decay accelerating factor for | | |
| | complement (Cromer blood group), | | |
| | transcript variant 2 | | |
| CKMT1B | Homo sapiens creatine kinase, | NM_020990 | SEQ ID NO: 84 |
| | mitochondrial 1B, nuclear gene | | |
| | encoding mitochondrial protein | | |
| CMIP | Homo sapiens c-Maf-inducing | NM_198390 | SEQ ID NO: 293 |
| | protein, transcript variant C-mip | | |
| COQ10A | Homo sapiens coenzyme Q10 | NM_144576 | SEQ ID NO: 294 |
| | homolog A (Scerevisiae), transcript | | |
| | variant 1 | | |
| CPLX2 | Homo sapiens complexin 2, | NM_006650 | SEQ ID NO: 5 |
| | transcript variant 1 | | |
| CYFIP2 | Homo sapiens cytoplasmic FMR1 | NM_001037333 | SEQ ID NO: 295 |
| | interacting protein 2, transcript | | |
| | variant 1 | | |
| EFR3B | Homo sapiens EFR3 homolog B | NM_014971 | SEQ ID NO: 296 |
| | (Scerevisiae) | | |
| EID1 | Homo sapiens EP300 interacting | NM_014335 | SEQ ID NO: 297 |
| | inhibitor of differentiation 1 | | |
| FAM107B | Homo sapiens family with sequence | NM_031453 | SEQ ID NO: 298 |
| | similarity 107, member B | | |
| FAM171B | Homo sapiens family with sequence | NM_177454 | SEQ ID NO: 299 |
| | similarity 171, member B | | |
| FKBP1B | Homo sapiens FK506 binding | NM_054033 | SEQ ID NO: 300 |
| | protein 1B, 12.6 kDa, transcript | | |
| | variant 2 | | |
| MFSD6 | Homo sapiens major facilitator | NM_017694 | SEQ ID NO: 301 |
| | superfamily domain containing 6 | | |
| FLJ23834 | Homo sapiens hypothetical protein | NM_152750 | SEQ ID NO: 302 |
| | FLJ23834 | | |
| FLJ37078 | Homo sapiens hypothetical protein | NM_001110199 | SEQ ID NO: 303 |
| | FLJ37078 | | |
| FOXO6 | PREDICTED: Homo sapiens | XM_002342102 | SEQ ID NO: 304 |
| | forkhead box protein O6 | | |
| FREQ | Homo sapiens frequenin homolog | NM_014286 | SEQ ID NO: 305 |
| | (Drosophila), transcript variant 1 | | |
| GABARAPL2 | Homo sapiens GABA(A) receptor- | NM_007285 | SEQ ID NO: 306 |
| | associated protein-like 2 | | |
| GDI1 | Homo sapiens GDP dissociation | NM_001493 | SEQ ID NO: 307 |
| | inhibitor 1 | | |
| GNAS | Homo sapiens GNAS complex | NM_016592 | SEQ ID NO: 308 |
| | locus, transcript variant 4 | | |
| GPER | Homo sapiens G protein-coupled | NM_001039966 | SEQ ID NO: 309 |
| | estrogen receptor 1, transcript | | |
| | variant 3 | | |
| GPRIN1 | Homo sapiens G protein regulated | NM_052899 | SEQ ID NO: 310 |
| | inducer of neurite outgrowth 1 | | |
| C7orf68 | Homo sapiens chromosome 7 open | NM_013332 | SEQ ID NO: 311 |
| | reading frame 68, transcript variant 1 | | |
| HIGD1A | Homo sapiens HIG1 hypoxia | NM_001099669 | SEQ ID NO: 312 |
| | inducible domain family, member | | |
| | 1A, transcript variant 2 | | |
| HISPPD2A | Homo sapiens histidine acid | NM_001130859 | SEQ ID NO: 313 |
| | phosphatase domain containing 2A, | | |
| | transcript variant 6 | | |
| HMP19 | Homo sapiens HMP19 protein | NM_015980 | SEQ ID NO: 314 |
| HTT | Homo sapiens huntingtin | NM_002111 | SEQ ID NO: 315 |
| N/A | :c106175001-106173475 Homo | NC_000014 | SEQ ID NO: 316 |
| | sapiens chromosome 14, GRCh37 | | |
| | primary reference assembly IGHA1 | | |
| N/A | :c106209407-106207704 Homo | NC_000014 | SEQ ID NO: 317 |
| | sapiens chromosome 14, GRCh37 | | |
| | primary reference assembly IGHG1 | | |
| N/A | :90192948-90193424 Homo sapiens | NC_000002 | SEQ ID NO: 318 |
| | chromosome 2, GRCh37 primary | | |
| | reference assembly IGKV1D-13 | | |
| N/A | :22380474-23265085 Homo sapiens | NC_000022 | SEQ ID NO: 319 |
| | chromosome 22, GRCh37 primary | | |
| | reference assembly IGL@ | | |
| N/A | :23247168-23247205 Homo sapiens | NC_000022 | SEQ ID NO: 320 |
| | chromosome 22, GRCh37 primary | | |
| | reference assembly | | |
| IGLL3 | Homo sapiens immunoglobulin | NM_001013618 | SEQ ID NO: 321 |
| | lambda-like polypeptide 3 | | |
| N/A | :22734288-22735716 Homo sapiens | NC_000022 | SEQ ID NO: 322 |
| | chromosome 22, GRCh37 primary | | |
| | reference assembly | | |
| IGSF9B | Homo sapiens immunoglobulin | NM_014987 | SEQ ID NO: 323 |
| | superfamily, member 9B | | |
| KCND3 | Homo sapiens potassium voltage- | NM_172198 | SEQ ID NO: 324 |
| | gated channel, Shal-related | | |
| | subfamily, member 3, transcript | | |
| | variant 2 | | |
| KIAA1661 | Homo sapiens mRNA for | AB051448 | SEQ ID NO: 325 |
| | KIAA1661 protein, partial cds | | |
| KIF5C | Homo sapiens kinesin family | NM_004522 | SEQ ID NO: 326 |
| | member 5C | | |
| KIRREL3 | Homo sapiens kin of IRRE like 3 | NM_032531 | SEQ ID NO: 327 |
| | (Drosophila) | | |
| KRT222P | Homo sapiens keratin 222 | NM_152349 | SEQ ID NO: 328 |
| | pseudogene | | |
| LHFPL4 | Homo sapiens lipoma HMGIC | NM_198560 | SEQ ID NO: 329 |
| | fusion partner-like 4 | | |
| LOC100130100 | PREDICTED: Homo sapiens similar | XM_001716615 | SEQ ID NO: 330 |
| | to hCG26659 | | |
| LRRN3 | Homo sapiens leucine rich repeat | NM_001099660 | SEQ ID NO: 331 |
| | neuronal 3, transcript variant 1 | | |
| MAGI2 | Homo sapiens membrane associated | NM_012301 | SEQ ID NO: 332 |
| | guanylate kinase, WW and PDZ | | |
| | domain containing 2 | | |
| MAGT1 | Homo sapiens magnesium | NM_032121 | SEQ ID NO: 333 |
| | transporter 1 | | |
| MCTP2 | Homo sapiens multiple C2 domains, | NM_018349 | SEQ ID NO: 334 |
| | transmembrane 2 | | |
| MDGA2 | Homo sapiens MAM domain | NM_001113498 | SEQ ID NO: 335 |
| | containing | | |
| | glycosylphosphatidylinositol anchor | | |
| | 2, transcript variant 1 | | |
| CLEC18C | Homo sapiens C-type lectin domain | NM_173619 | SEQ ID NO: 336 |
| | family 18, member C | | |
| NEFH | Homo sapiens neurofilament, heavy | NM_021076 | SEQ ID NO: 337 |
| | polypeptide | | |
| NFASC | Homo sapiens neurofascin homolog | NM_015090 | SEQ ID NO: 41 |
| | (chicken) | | |
| NOS1AP | Homo sapiens nitric oxide synthase | NM_014697 | SEQ ID NO: 338 |
| | 1 (neuronal) adaptor protein, | | |
| | transcript variant 1 | | |
| NRXN1 | Homo sapiens neurexin 1, transcript | NM_004801 | SEQ ID NO: 339 |
| | variant alpha1 | | |
| NUP62 | Homo sapiens nucleoporin 62 kDa, | NM_153718 | SEQ ID NO: 340 |
| | transcript variant 3 | | |
| HAUS8 | Homo sapiens HAUS augmin-like | NM_033417 | SEQ ID NO: 341 |
| | complex, subunit 8, transcript | | |
| | variant 1 | | |
| OBFC2A | Homo sapiens | NR_024415 | SEQ ID NO: 342 |
| | oligonucleotide/oligosaccharide- | | |
| | binding fold containing 2A, | | |
| | transcript variant 2, transcribed | | |
| | RNA | | |
| PCDHA10 | Homo sapiens protocadherin alpha | NM_018901 | SEQ ID NO: 343 |
| | 10, transcript variant 1 | | |
| PCDHA6 | Homo sapiens protocadherin alpha | NM_018909 | SEQ ID NO: 90 |
| | 6, transcript variant 1 | | |
| PDPN | Homo sapiens podoplanin, transcript | NM_006474 | SEQ ID NO: 344 |
| | variant 1 | | |
| PGBD3 | Homo sapiens piggyBac | NM_170753 | SEQ ID NO: 345 |
| | transposable element derived 3 | | |
| P4HTM | Homo sapiens prolyl 4-hydroxylase, | NM_177938 | SEQ ID NO: 346 |
| | transmembrane (endoplasmic | | |
| | reticulum), transcript variant 3 | | |
| PHF21B | Homo sapiens PHD finger protein | NM_001135862 | SEQ ID NO: 347 |
| | 21B, transcript variant 2 | | |
| PMS2L5 | Homo sapiens postmeiotic | NM_174930 | SEQ ID NO: 348 |
| | segregation increased 2-like 5 | | |
| PRICKLE3 | Homo sapiens prickle homolog 3 | NM_006150 | SEQ ID NO: 349 |
| | (Drosophila) | | |
| PRUNE2 | Homo sapiens prune homolog 2 | NM_015225 | SEQ ID NO: 350 |
| | (Drosophila) | | |
| RAB1A | Homo sapiens RAB1A, member | NM_015543 | SEQ ID NO: 351 |
| | RAS oncogene family, transcript | | |
| | variant 2 | | |
| RANBP17 | Homo sapiens RAN binding protein | NM_022897 | SEQ ID NO: 352 |
| | 17 | | |
| RELL2 | Homo sapiens RELT-like 2, | NM_173828 | SEQ ID NO: 46 |
| | transcript variant 1 | | |
| RHBDD2 | Homo sapiens rhomboid domain | NM_001040457 | SEQ ID NO: 353 |
| | containing 2, transcript variant 2 | | |
| RMST | Homo sapiens rhabdomyosarcoma 2 | NR_024037 | SEQ ID NO: 354 |
| | associated transcript (non-protein | | |
| | coding), non-coding RNA | | |
| FLJ30058 | Homo sapiens hypothetical protein | NM_144967 | SEQ ID NO: 355 |
| | FLJ30058 | | |
| RPL10A | Homo sapiens ribosomal protein | NM_007104 | SEQ ID NO: 356 |
| | L10a | | |
| RPS24 | Homo sapiens ribosomal protein | NM_001142285 | SEQ ID NO: 357 |
| | S24, transcript variant d | | |
| RUNDC3A | Homo sapiens RUN domain | NM_001144825 | SEQ ID NO: 16 |
| | containing 3A, transcript variant 1 | | |
| SCAMP5 | Homo sapiens secretory carrier | NM_138967 | SEQ ID NO: 17 |
| | membrane protein 5 | | |
| SCG5 | Homo sapiens secretogranin V (7B2 | NM_001144757 | SEQ ID NO: 358 |
| | protein), transcript variant 1 | | |
| SERGEF | Homo sapiens secretion regulating | NM_012139 | SEQ ID NO: 359 |
| | guanine nucleotide exchange factor | | |
| SFT2D1 | Homo sapiens SFT2 domain | NM_145169 | SEQ ID NO: 360 |
| | containing 1 | | |
| SGMS2 | Homo sapiens sphingomyelin | NM_001136258 | SEQ ID NO: 361 |
| | synthase 2, transcript variant 3 | | |
| SLC22A4 | Homo sapiens solute carrier family | NM_003059 | SEQ ID NO: 362 |
| | 22 (organic cation/ergothioneine | | |
| | transporter), member 4 | | |
| SNAP25 | Homo sapiens synaptosomal- | NM_003081 | SEQ ID NO: 19 |
| | associated protein, 25 kDa, transcript | | |
| | variant 1 | | |
| ST8SIA4 | Homo sapiens ST8 alpha-N-acetyl- | NM_005668 | SEQ ID NO: 363 |
| | neuraminide alpha-2,8- | | |
| | sialyltransferase 4, transcript variant 1 | | |
| STXBP1 | Homo sapiens syntaxin binding | NM_003165 | SEQ ID NO: 364 |
| | protein 1, transcript variant 1 | | |
| SYNC | Homo sapiens syncoilin, | NM_030786 | SEQ ID NO: 365 |
| | intermediate filament protein, | | |
| | transcript variant 1 | | |
| SYPL1 | Homo sapiens synaptophysin-like 1, | NM_006754 | SEQ ID NO: 366 |
| | transcript variant 1 | | |
| TC2N | Homo sapiens tandem C2 domains, | NM_001128596 | SEQ ID NO: 367 |
| | nuclear, transcript variant 3 | | |
| TMEM145 | Homo sapiens transmembrane | NM_173633 | SEQ ID NO: 368 |
| | protein 145 | | |
| TMEM181 | Homo sapiens transmembrane | NM_020823 | SEQ ID NO: 369 |
| | protein 181 | | |
| TMEM198 | Homo sapiens transmembrane | NM_001005209 | SEQ ID NO: 370 |
| | protein 198 | | |
| TMEM25 | Homo sapiens transmembrane | NM_032780 | SEQ ID NO: 371 |
| | protein 25, transcript variant 1 | | |
| TMEM87A | Homo sapiens transmembrane | NM_015497 | SEQ ID NO: 372 |
| | protein 87A, transcript variant 1 | | |
| UBD | Homo sapiens ubiquitin D | NM_006398 | SEQ ID NO: 373 |
| VAMP2 | Homo sapiens vesicle-associated | NM_014232 | SEQ ID NO: 374 |
| | membrane protein 2 (synaptobrevin | | |
| | 2) | | |
| WIPI1 | Homo sapiens WD repeat domain, | NM_017983 | SEQ ID NO: 375 |
| | phosphoinositide interacting 1 | | |
| LOC91316 | Homo sapiens glucuronidase, beta/ | NR_024448 | SEQ ID NO: 376 |
| | immunoglobulin lambda-like | | |
| | polypeptide 1 pseudogene, non- | | |
| | coding RNA | | |
| APH1B | Homo sapiens anterior pharynx | NM_031301 | SEQ ID NO: 377 |
| | defective 1 homolog B (Celegans), | | |
| | transcript variant 1 (LOC145842) | | |
| FLJ37752 | Homo sapiens cDNA FLJ37752 fis, | AK095071 | SEQ ID NO: 378 |
| | clone BRHIP2023309 | | |
| LOC387895 | PREDICTED: Homo sapiens | XM_373553 | SEQ ID NO: 379 |
| | hypothetical gene supported by | | |
| | BC040060 | | |
| LOC730125 | PREDICTED: Homo sapiens | XM_001134301 | SEQ ID NO: 380 |
| | hypothetical LOC730125 | | |
| LOC652493 | PREDICTED: Homo sapiens similar | XM_001724425 | SEQ ID NO: 381 |
| | to pre-B lymphocyte gene 1 | | |
| FBLL1 | Homo sapiens fibrillarin-like 1, non- | NR_024356 | SEQ ID NO: 382 |
| | coding RNA | | |

*Transcript accession numbers beginning “ENST” are from the Ensembl Project database; all other accession numbers are from GenBank.

[0107] To verify the accuracy of these gene signatures and to determine whether loss of REST/NRSF function occurred exclusively in neoplastic mammary tissue, the 24-gene signature was used to screen 66 non-neoplastic mammary samples, half of which came from non-tumor bearing normal breast and half of which were adjacent normal stroma from a tumor-bearing breast (Finak et al., 2006, Breast Cancer Res 8:R58). The results of these assays are shown in FIG. 6. No cells exhibiting the RESTless phenotype were observed in any of the 66 stromal samples, suggesting that only carcinoma cells carry this defect in tumors.

### Example 3

### Tumors Positive for Gene Signature Express REST4 Truncated Variant

[0108] To determine the basis of REST/NRSF dysfunction in breast cancer, breast cancer cell lines were examined for REST/NRSF gene mutations and splice variants.

[0109] Tumor samples (including those that did and those that did not express a gene signature of the invention) were examined for the presence of either a REST/NRSF gene point mutation in the coding region or potential alternative splicing variants, specifically a REST4 truncated variant, a variant known in the art to be expressed in tumors but not in breast cancer. These experiments were performed as follows. RNA extracted from patient tumor samples was subjected to RT-PCR analysis. RNA was extracted from tumor biopsies obtained from patients using standard molecular biological techniques. Briefly, RNA was extracted using TRIzol (Invitrogen, Carlsbad, Calif.) and quantified using a Nanodrop product (Thermo Scientific, Wilmington, Del.). RNA (50 ng) was subjected to amplification using the Megascript kit (Ambion/Applied Biosystems, Austin, Tex.) to yield between 2-5 ug RNA. A portion of this amplified RNA (500 ng) was reverse transcribed into cDNA, and 5 ng cDNA used in subsequent PCR reactions.

[0110] These assays showed that breast cancer tumor samples expressing a gene signature of the invention also expressed the REST4 splice variant, whereas tumors that did not express such a gene signature expressed full-length REST/NRSF (FIG. 9A). These data indicated that alternative splicing of REST/NRSF occurs in 4% of breast tumors and results in loss of REST/NRSF function and derepression of REST/NRSF target genes. In summary, these results indicated that REST/NRSF function is lost by alternative splicing in 4% of breast cancer tumors and is associated with expression of the gene signatures disclosed herein.

[0111] The primers utilized in the RT-PCR analysis shown in FIGS. 9A and 9B accurately identified REST4 variants, but other primer combinations and quantification/imaging strategies also can be utilized and are within the scope of this invention. Specifically, primers that flank the alternative exon that result in REST4 expression can be selected (labeled ‘N’ in Palm et al., 1999, Brain Res Mol Brain Res 72: 30). The sense primer can be in the first coding exon and anti-sense primer in the third coding exon. Amplification with these primers results in a 400 bp band for REST/NRSF and 450 bp for REST4. Alternatively, the sense primer can be located in the second coding exon or specific primers can be designed to identify a portion of the REST 4 exon sequence. However, other primer combinations are within the scope of this invention.

[0112] The two differential PCR products were reliably resolved on an agarose gel (as shown in FIGS. 9A and 9B). Alternatively the RT-PCR products can be distinguished by alternative means such as, for example, Real Time PCR incorporating CYBR green fluorescence. The basis for differentiation would be based on a higher melting point for the REST4 product (due to its larger size), which will manifest as a right-shifted melt-curve. Hence, two read temperatures (one below the 400 bp melt temperature and one between the 400 and 450 bp melt temperature) yield the total amount of REST/NRSF transcripts (REST+REST4) and also REST4 alone: the lower read temperature yielded REST+REST4 levels and the higher read temperature yielded REST4. The advantage of this approach was that both R4+and R4- tumors give a positive signal and provide a positive control for the assay. Thus a negative status call for REST4 would not be due to failure of any portion of the extraction/amplification protocol. Alternatively, an exon-N specific primer and primer in the neighboring exon can be used to generate a PCR product when REST4 is expressed. This can be quantified and compared to the signal from any number of housekeeping genes.

[0113] Testing RNA extracted from needle biopsies for REST4 status provided an alternative means for establishing NRST/REST functionality. Samples were examined for the presence of the gene signature. Tumors expressing a gene signature of the invention also showed increased levels of the REST/NRSF splice variant REST4.

[0114] Whether aberrant REST/NRSF splicing could explain the loss of REST/NRSF function in breast cancer tumor samples was determined. RNA was extracted from two RESTless and seven RESTfl breast cancer tumor samples and amplified across REST/NRSF mRNA exon junctions using primers flanking the alternative REST4 exon (FIG. 10A). This analysis detected high levels of alternative splicing to produce REST4 in RESTless tumors, which could not be detected in RESTfl tumors (FIG. 10B). Selective amplification of REST4 using a primer placed in the REST4 exon confirmed the presence of the splice variant expression exclusively in the RESTless tumors (FIGS. 10B and 11).

[0115] The positive statistical correlation found as set forth above between expression of the gene signatures of this invention and lower disease-free survival times in breast cancer samples was confirmed for the correlation between poor disease-free survival and RESTless status (p=0.007), with the average time to relapse for RESTless tumors (14 months) being less than half the average for RESTfl tumors (35.9 months) (p=0.0217). RESTless tumors from this cohort also had significantly increased tumor size and lymph node involvement, alongside several other markers of aggressive, treatment-resistant breast cancers summarized in Table 5.

TABLE 5
Characteristics of RESTless Breast Cancer: Immunohistochemical analysis of REST/NRSF
staining in 182 breast tumors with corresponding patient outcome data.

| | | | | | | Average | | | |
|---|---|---|---|---|---|---|---|---|---|
| | | Chromo- | | | | Time to Total | | | |
| | | granin | HER2 | | | Relapse | | Nodal | Percent |
| | | Pos. | Pos. | Grade | Size | (months) | Age | Number | Relapse |
| All | RESTless | 10.8% | 13.5% | 2.41 +/− 0.13 | 3.88 +/− 0.39 | 14.0 +/− 1.8 | 53.4 +/− 2.19 | 4.8 +/− 1.2 | 43% |
| Tumors | (n = 37) | (0.0007) | (0.496) | (0.0269) | (0.0012) | (0.0217) | (0.0494) | (0.020) | (0.054) |
| | RESTfl | 0.7% | 9.7% | 2.07 +/− 0.07 | 2.65 +/− 0.16 | 35.9 +/− 3.02 | 58.3 +/− 1.11 | 2.6 +/− 0.4 | 27.0% |
| | (n = 145) | | | | | | | | |
| ER+ | RESTless | 15% | 10% | 1.95 +/− 0.18 | 3.49 +/− 0.55 | 17.3 +/− 2.6 | 55.45 +/− 3.3 | 3.95 +/− 1 | 35% |
| Tumors | (n = 20) | (0.0007) | (0.0164) | (0.45) | (0.0142) | (0.127) | (0.0716) | (0.127) | (0.161) |
| | RESTfl | 0.9% | 2.6% | 1.86 +/− 0.07 | 2.59 +/− 0.17 | 42.4 +/− 3.82 | 60.00 +/− 1.2 | 2.3 +/− 0.4 | 23.0% |
| | (n = 115) | | | | | | | | |
| Triple Neg | RESTless | 7.7% | | 2.92 +/− 0.1 | 3.45 +/− 0.3 | 5 +/− 0.88 | 50.8 +/− 3.5 | 6.92 +/− 2.4 | 46% |
| Tumors | (n = 13) | (0.233) | | (0.217) | (0.0568) | (0.0109) | (0.0895) | (0.168) | (0.26) |
| | RESTfl | 0.0% | | 3.00 +/− 0 | 2.47 +/− 0.4 | 16.6 +/− 1.9 | 53.0 +/− 2.8 | 3.47 +/− 1.1 | 26.0% |
| | (n = 19) | | | | | | | | |

Figures shown represent the mean value plus or minus the standard error of all samples in the indicated cohort, with the Pearson chi-squared test for independence with the indicated p-value. Bold values indicate parameters with statistically significant (p < 0.05) correlation with RESTless tumors.

[0116] In addition, patients with so-called “triple negative (TN) tumors” (i.e., Estrogen Receptor (ER)⁻/Progesterone Receptor⁻/HER2⁻) that were also RESTless endured significantly greater disease recurrence within 2 years than TN/RESTfl patients (50% versus 20% recurrence (p=0.044, n=32)). Patients with RESTless ER+ breast tumors were also more prone to relapse in the first 3 years (p=0.003, n=135). Strikingly, 100% of disease recurrence events for patients with RESTless tumors occurred in the first 36 months, compared to 61% of recurrence events for patients with RESTfl tumors. Importantly, after 3 years, there were no additional recurrences of RESTless tumors. These data indicate that the presence of REST4 leads to a more aggressive disease, which is more likely to recur within 3 years of diagnosis.

[0117] These results demonstrated that REST/NRSF function is lost in a fraction of breast tumors. The loss of REST/NRSF function was due in these tumors to alternative splicing of REST/NRSF, and RESTless tumors were associated with aggressive, rapid recurrence and poor prognosis.

### Example 4

### Immunohistochemical Analysis of REST/NRSF Truncated Protein in Breast Cancer

[0118] To determine the frequency of REST/NRSF protein truncation in breast cancer, an immunohistochemical (IHC) screen was developed using an antibody directed to the C-terminus of REST/NRSF (Atlas Antibodies, Stockholm). REST4 and a truncated form of REST/NRSF identified as a SNP in colon cancer (Westbrook et al., 2005, Cell, 121:837-848) are not recognized by this antibody, permitting all tumors lacking full-length REST to be identified specifically. RESTless tumors lacked antibody staining, whereas RESTfl exhibit nuclear staining

[0119] REST labeling was performed using a Lab Vision Autostainer 360 (Thermo Fischer Scientific Fremont, Calif.) as follows. After deparaffinization, heat-induced epitope retrieval with citrate buffer and endogenous peroxidase inhibition was performed, and the slides then blocked with Background Sniper™ (Biocare Medical, Concord, Calif.). The sections were then incubated with rabbit anti-REST antibody (HPA006079, Sigma-Aldrich St Louis, Mo.) at a concentration of 0.5 μg/mL for 60 minutes. After washing, Mach3™ detection system (Biocare Medical, Concord, Calif.) was applied. The labeling reaction was manually scored by a board-certified pathologist for cytoplasmic and nuclear carcinoma cell compartments, using the method described by Harvey and colleagues (Harvey et al., 1999, J Clin Oncol 17:1474-81).

[0120] Immunohistochemical analysis of 182 breast tumors in a tissue microarray confirmed the lack of full-length nuclear, and therefore functional REST/NRSF predicted by the REST4 splicing in 37 tumor samples (results shown in FIGS. 12 and 12B).

[0121] As an additional measure of REST function, breast cancer tissue sections were stained for ectopic expression of chromogranin A, a REST target gene and a component of the 24-gene REST gene signature. Chromogranin A is a secreted factor that is seldom found outside the nervous system /neuroendocrine tumors. Four-micron sections of previously characterized tissue microarrays, which contain duplicate tissue cores from 207 human breast carcinomas, were used for labeling experiments (Baba et al., 2006, Breast Cancer Res Treat 98:91-8). Chromogranin A labeling was performed on an automated Ventana instrument (Ventana Medical Systems, Tucson, Ariz.). After standard deparaffinization, epitope retrieval was performed with CC1 high-pH buffer (Ventana Medical Systems). In the automated protocol provided by the instrument manufacturer, the prediluted anti-chromogranin A antibody (Clone LK2H10, Ventana Medical Systems) was added to the deparaffinzed tissue samples for 32 minutes at 42° C. A universal secondary antibody was then added, and target detection was accomplished with an indirect biotin-avidin-peroxidase procedure provided by the manufacturer.

[0122] In RESTless tumors, chromogranin A expression was found to be upregulated by several orders of magnitude above what is seen in normal breast. Interestingly, samples that stained negative for REST/NRSF showed a statistically significant enrichment in staining for the REST target chromogranin-A (CHGA), consistent with a loss of REST/NRSF repression (p<0.01; FIGS. 12C and 12D).

[0123] Lack of REST/NRSF function correlates with poor cancer prognosis. The absence of the C-terminal domain in REST4 mutants provided a means for IHC screening for loss of full-length REST/NRSF using an antibody raised against the C-terminus of REST. Immunohistochemical analysis on the panel of 182 tumor samples with associated outcome data showed that patients with RESTless tumors experience a 20% reduction in disease free survival over 10 years when compared to their RESTfl counterparts (p=0.007), as shown in FIG. 13. The majority of the outcome disparity between patients with RESTless and RESTfl tumors occurs in the first three years post-diagnosis. Fifty percent of patients with RESTless tumors showed recurrence within three years, which represented 100% of all patients with RESTless tumors that relapsed in this data set. By comparison, 16% of patients with RESTfl tumors showed recurrence within three years. RESTless tumors strongly correlated with decreased time to disease recurrence, increased tumor size, and a higher number of lymph node metastases, all of which demonstrated a more aggressive disease course (Table 5).

[0124] Remarkably, RESTless tumors were found in all histological classes of breast tumors, and all classes showed a poorer prognosis without functional REST. RESTless triple negative tumors showed a particularly aggressive disease course. Of the 32 triple negative tumors screened, 13 were found to be RESTless, six (46%) of which recurred in the first 12 months post-diagnosis, compared to just one of the 19 (5%) RESTfl triple negative tumors (p=0.003). However, no TN RESTless tumor recurred after 12 months in 10 years of patient outcome data. ER+ RESTless tumors showed a similar pattern of early recurrence, wherein eight of 21 (38%) patients saw disease recurrence in the first 36 months, compared to just 11% of ER+ RESTfl patients (p=0.003). Thereafter, none of the remaining 13 disease free patients with ER+ RESTless tumors experienced recurrence, compared to 12 of the 102 remaining disease-free ER+ RESTfl patients. These data suggest that RESTless tumors represent a distinct, aggressive subset of breast tumors with a unique disease course.

[0125] The above immunohistochemical analyses produced a robust screen that can be taken to the clinic to assess REST4 expression in breast tumors, which can facilitate early diagnosis of negative prognosis for around 10,000 breast cancer patients per year in the U.S.

### Example 5

### REST/NRSF Knockdown Increases Tumor Growth in Mice

[0126] To determine whether REST loss is a marker or driver of tumor aggression, xenograft experiments were performed to measure the effect of REST knockdown on tumor growth in nude mice. The studies provided herein illustrated that REST is lost in 20% of breast cancers, and that these “RESTless” tumors are highly aggressive (Wagoner et al., 2010, PLoS Genet, 6: e1000979). These studies further demonstrated that REST is a direct transcriptional repressor of the tumor promoter LIN28. In vitro and in vivo data presented herein further showed that LIN28 expression was a critical factor for increased tumorigenicity of REST knockdown cells, and demonstrated that LIN28 mRNA levels were increased in human breast cancers lacking REST.

[0127] Control (shCon) or REST knockdown (shREST) MCF7 cells were injected subcutaneously into the flanks or mammary fat pads of female athymic nude mice, and tumor growth was measured. Adult intact female athymic nude-Foxn1^{nu} mice (Harlan Laboratories, Indianapolis, Ind.) were used for xenograft studies. MCF7 cells were suspended in a cold 1:3 Matrigel/DMEM solution, and 10⁶ cells were injected per injection site. Each mouse received two subcutaneous flank injections as well as subcutaneous injections into the fat pads of the 4^{th} and/or 9^{th} mammary glands. Tumors were monitored weekly by palpation and caliper measurements. Statistical analysis was done using Mstat software; Kaplan-Meier and Logrank survival analyses were performed on tumor take data, while tumor burden was evaluated using the Wilcoxon rank sum test, and two-sided p-values were used throughout.

[0128] By 100 days post-injection, the tumor take rate was significantly greater for shREST than shCon tumors (p=0.018; at 200 days, p=0.0005). Tumor take rate and growth by injection site were further analyzed. Two hundred days post-injection, 25% (7/28) of shREST mammary fat pad injection sites had given rise to tumors, compared with 0% (0/28) of shCon injections (p=0.005, FIG. 14A). The total tumor burden for shREST mammary fat pad tumors was 1458 mm³, versus 0 mm³ for shCon tumors (p=0.005, FIG. 14B). The tumor take rate was also significantly increased for shREST versus shCon MCF7s when injected subcutaneously into the flanks of the nude mice, with 34.4% (11/32) of shREST injection sites giving rise to tumors, while only 12.5% (4/32) of shCon injections gave rise to tumors by 200 days post-injection (p=0.040, FIG. 14C). The total tumor burden was significantly greater for shREST than shCon tumors, at 3885 mm³ and 867 mm³, respectively (p=0.037, FIG. 14D).

[0129] In conclusion, the REST knockdown resulted in a statistically significant increase in tumorigenicity of MCF7 cells at both the orthotopic mammary fat pad and the flank injection sites. The shREST tumors were epithelial in phenotype, highly anaplastic, displayed a high mitotic rate and exhibited nuclei that varied greatly in size. In addition, 62.5% (5/8) of shREST flank tumors examined show localized invasion into adjacent muscle (FIG. 14E). These data illustrate that a loss of REST function causes an increase in cancer aggression.

### Example 6

### REST/NRSF Induces Expression of Tumor Promoter LIN 28

[0130] The results set forth herein, particularly in Example 4, established that REST/NRSF is lost in a distinct subset of breast tumors. Moreover, breast cancer tumors and cell lines that lack REST/NRSF functionality exhibited elevated LIN28 expression.

[0131] In an effort to understand the basis for poor clinical outcomes experienced by patients with RESTless breast cancer, DNA microarrays of REST/NRSF knockdown cell lines were probed for genes upregulated by a loss of REST/NRSF that have been linked to aggressive cancer. Expression of the tumor promoter and pluripotency factor LIN28 was found to be elevated in response to REST/NRSF knockdown in multiple cell lines including T47D and MDA-MB-23 (FIG. 15A).

[0132] LIN28 mRNA levels were assessed using real time reverse-transcriptase PCR (qRT-PCR). RNA was harvested from cells using Trizol (Invitrogen, Carlsbad, Calif.), and reverse transcribed using Superscript III reverse transcriptase (Invitrogen, Carlsbad, Calif.) per the manufacturer's instructions. cDNA was amplified using Takara SYBR Premix ExTaq on an MJR Opticon II real-time thermocycler with 20 ng of RNA equivalent cDNA per reaction. All qRT-PCR experiments were performed in triplicate comparing gene expression between cell lines using beta actin mRNA levels as a normalizing control. Chromatin immunoprecipitation experiments were performed as previously described (Roopra et al., 2004, Mol. Cell 14: 727-38, incorporated by reference herein) using Santa Cruz anti-REST antibody H-290. Chromatin immunoprecipitation (ChIP) data are presented as fold-enrichment of H-290 antibody over a non-targeting IgG antibody. Western blots were imaged and quantified on a Kodak Imagestation 2000R using Kodak 1D image analysis software (Carestream Health Rochester, N.Y.).

[0133] Sequence analysis showed that an RE1 sequence was present 2 kb upstream from the human LIN28 promoter. ChIP experiments using HEK-293 and MCF7 cells revealed that REST/NRSF binds the LIN28 RE1 (FIG. 15B), suggesting that the site is functional. Additionally, knockdown of REST/NRSF resulted in increased LIN28 mRNA (FIG. 15A) and protein (FIG. 15C and FIG. 16) in multiple cell lines. Together, these results demonstrated that LIN28 was a direct target of REST/NRSF repression.

[0134] Given the role of LIN28 in suppressing maturation of the let-7 family of microRNAs, it was expected (in view of the results disclosed herein) that the let-7 target genes c-Myc and Ras would be upregulated upon REST/NRSF knockdown. This analysis was performed and confirmed in MCF7 cells (FIG. 15C). In aggregate, the data illustrated that REST/NRSF dysfunction induced expression of LIN28 and at least two of its oncogenic target genes, c-Myc and Ras.

[0135] LIN28 was found to be over-expressed in RESTless tumors. Analysis of cDNA microarray data from 289 breast tumors showed that the median expression level of LIN28 in RESTless tumors was greater than the 90^{th} percentile expression in RESTfl tumors (p<0.05) (FIG. 15D), further supporting the in vitro findings.

[0136] LIN28 has been shown to contribute to cellular transformation in other cell lines (Dangi-Garimella et. al., 2009, EMBO J28:347-58;Viswanathan, et. al., 2009, Nat Genet 41:843-48). Loss of REST/NRSF function also induced focus formation in a LIN28-dependent manner. MCF7 breast cancer cells formed spontaneous foci following REST/NRSF knockdown (FIG. 15E). This phenotype was used to determine whether LIN28 overexpression in RESTless breast cancer tumor cells conferred a growth advantage to breast tumor cells. In these experiments, MCF7 cells stably expressing shRNAs as described above were trypsinized (Cellgro 0.25% Trypsin MT 25-050-CI, Mediatech, Inc Manassas, Va.) for 2 min at room temperature and repeatedly aspirated. One million MCF7 cells were plated per 100 mm plate and allowed to grow for 72 hours, followed by methanol fixation. Plates were stained with Giemsa stain (Fluka Analytical catalog #11700, Sigma-Aldrich St Louis, Mo.) for 30 minutes. Stained plates were scanned and foci were quantified using NIH ImageJ Research Services Branch, National Institute of Mental Health, Bethesda, Md.).

[0137] Foci detected in this manner were trypsin-resistant aggregates of shREST-expressing MCF7 cells that readily formed in subconfluent cell culture. After typsinization and resuspension, foci sedimented rapidly, and continued to grow following passage. REST/NRSF knockdown using either of two anti-REST shRNAs gave rise to foci in sub-confluent cell culture, whereas the control infection with lentivirus expressing a non-targeting shRNA failed to generate foci (FIG. 15E). These focus formation assays were repeated using MCF7 cells stably expressing either anti-LIN28 shRNA (LIN28^{low}), which repressed LIN 28, or non-targeting control (LIN28^{WT}) shRNA, which was a negative control and did not impact LIN 28 levels. In the LIN28^{WT} background, shREST lentiviral particles induced a six-fold increase in focus formation over those re-treated with shCon lentiviral particles (FIG. 15E). However, in LIN28^{low} MCF7s, loss of REST/NRSF failed to induce focus formation.

[0138] Specific inhibition of LIN28 in cells deficient for REST/NRSF resulted in focus formation. Indeed, these studies showed that LIN28 knockdown was sufficient to inhibit the increased focus formation induced by REST/NRSF knockdown (FIG. 15E). It was found that RESTless breast tumors also have higher LIN28 mRNA expression levels, supporting a functional role for LIN28 in breast cancer tumors in vivo. As set forth herein, LIN28 was also shown to be upregulated in GSE4922 RESTless breast tumors. It should be noted however that LIN28 was not part of the RESTless 24-gene signature, because although LIN28 expression was induced upon REST/NRSF knockdown in T47D and HEK cells, it was not increased in MCF10a cells. Nonetheless, LIN28 provides a useful single-gene gene signature for the identification of RESTless tumors. Given the higher levels of lymph node metastasis in RESTless breast cancer and the aberrant expression of LIN28 in other aggressive cancers, the studies described herein support the role of LIN28 as a key contributor to the aggressive nature of RESTless breast cancer, and an important marker and gene signature for aggressive forms of breast cancer in vivo.

[0139] In summary, the results of the experiments set forth herein demonstrated that RESTless tumors represent a distinct, aggressive subset of breast tumors with a unique disease course. REST/NRSF status is an important predictor of poor prognosis that correlated with increased lymph node metastasis and early disease recurrence. REST/NRSF is an important regulator of LIN28, a protein involved in tumorigenesis in several cancer types. In view of LIN28's role in focus formation and other attributes of aggressive cancers, LIN28 overexpression in RESTless breast tumors is an important gene signature for aggressive breast cancers.

### Example 7

### Tumor Promoter LIN28 is a Direct Target of Transcriptional Repression by REST/NRSF

[0140] As described in Example 1, knockdown REST cells were produced in HEK-293, T47D and MCF10a cell lines. MCF7, normal murine mammary gland (NMuMG) and HEK-293 cells were grown in DMEM and T47Ds in RPMI, all supplemented with 10% fetal bovine serum, 100 IU/ml penicillin, 100 μg/ml streptomycin and 250 ng/ml amphotericin-B. NMuMG and T47D cells were additionally supplemented with 10 μg/ml insulin. All cells were grown at 37° C. in 5% CO₂. Stable REST knockdown was achieved using a Dharmacon SMARTvector lentiviral shRNA delivery system, as per manufacturer's instructions (also described in Wagoner et al., 2010, PLoS Genet, 6: e1000979). Stable knockdown of LIN28 (shLIN28) was achieved by infecting cells with lentivirus expressing an anti-LIN28 shRNA (clone TRCN0000102579) in a pLKO.1 vector obtained from Open Biosytems (Huntsville, Ala.). Lentiviral particles were generated and MCF7 cells infected according to Addgene's pLKO.1 protocol (www.addgene.org/pgvec1?f=c&cmd=showcol&colid=170&page=2; incorporated by reference herein).

[0141] Upon REST knockdown, the tumor promoter and master regulator of microRNA processing LIN28 is upregulated in T47D and HEK-293 cells. Because LIN28′s potential upregulation is associated with a variety of advanced cancers (Viswanathan, et al., 2009, Nat Genet, 41:843-48), and because of LIN28′s potential role in breast cancer aggression and metastasis (Dangi-Garimella et al., 2009, EMBO J, 28:347-358), the regulatory relationship between REST and LIN28 and the role of LIN28 in RESTless aggression was further characterized.

[0142] The following studies were performed to determine if an increase in LIN28 expression observed upon REST knockdown was a direct result of REST loss. Sequence analysis showed that the LIN28 promoter contains a REST binding site (RE1) ˜2 kb upstream of the transcriptional start site, and conservation analysis demonstrates that this RE1 site is evolutionarily conserved among mammals (a diagrammatic representation of this conservation is shown in FIG. 17A). Quantitative chromatin immunoprecipitation revealed that REST binds this RE1 site with high affinity.

[0143] In the performance of chromatin immunoprecipitation studies, cells were fixed with formaldehyde (1%) at 37° C. for 10-15 minutes, washed with cold PBS and harvested into lysis buffer (150 mM NaCl, 10% glycerol, 0.3% Triton X-100, 50 mM Tris pH 8.0, protease inhibitor) followed by sonication on ice and centrifugation at 12,000×g for 30 min. 2 μg of anti-REST antibody (H-290, Santa Cruz Biotech, Santa Cruz, Calif.) or rabbit IgG (Sigma-Aldrich, St. Louis, Mo.) was added 300 μg total protein and agitated overnight at 4° C. Samples are centrifuged at 12,000×g for 30 min and supernatant was incubated with protein G Sepharose beads (previously blocked with herring sperm DNA and BSA) for 1 hour at 4° C. with agitation. Supernatant was removed and beads were rinsed once and then washed four times for 5 minutes on ice with wash buffer (500 mM NaCl, 0.1% SDS, 1% Triton X-100, 2 mM EDTA, 20 mM Tris pH 8.1). Wash buffer was removed and beads were incubated overnight at 64° C. in 0.2M NaCl, 1% SDS, 0.1% NaHCO₃. DNA was isolated by phenol-chloroform extraction and isopropanol precipitation and analyzed by quantitative real-time PCR as previously described using the following primers:

Human LIN28:
(AGC GGG AAC CGG CAT TGA GGA A [SEQ ID NO: 383];
AAA GGG GAG TTG AAC GCT CTG GCT TCT [SEQ ID NO:
384]).
Human BDNF:
(TTACAGCGCGGCCAAGAAGACTAC [SEQ ID NO: 385];
CCA TCC GCA CGT GAC AAA CC [SEQ ID NO: 386]).
Human REST:
(TGG CCG CAC CTC AGC TTA TTA TG [SEQ ID NO: 387];
AGG CTG AGG TTC TAC GAC GCT GAG [SEQ ID NO:
388]).
Mouse BDNF:
(TCG CAT ACG TGG AAA GGG TCT CAT [SEQ ID NO:
389];
CAA ATC CGC TGG CTC TGT CC [SEQ ID NO: 390]).
Mouse LIN28:
(ATG TGT GTC AGG AGA CTT CGG AGG [SEQ ID NO:
391];
ATC ACT TGC TCT GTC CAG GGT G [SEQ ID NO: 392]).

[0144] Lysates from MCF7 cells were immunoprecipitated with an anti-REST or anti-IgG (sham) antibody, and their association with the LIN28, BDNF (positive control) and REST (negative control) promoter regions was assessed. The affinity of REST for each promoter region was calculated as the -fold increase in DNA precipitated with anti-REST versus sham IgG antibody. In these experiments, REST bound the LIN28 RE1 site with high affinity, approximately twice as tightly as it bound to the RE1 of BDNF, a canonical REST target gene (19-fold and 12-fold, respectively, FIG. 17B). As expected, REST din not bind to its own promoter region, which does not contain an RE1 site, with greater specificity than does IgG. Upon REST knockdown, REST binding at both the LIN28 and BDNF RE1 sites was ablated (data not shown). The high affinity of REST for the LIN28 promoter and its loss from the promoter upon REST knockdown was also observed in HEK and normal murine mammary gland (NMuMG) cells.

[0145] To determine whether REST binding to the LIN28 RE1 site correlated with LIN28 repression, LIN28 protein levels in control (shCon) and REST knockdown (shREST) MCF7 and T47D cells were measured by immunoblotting experiments. For immunoblotting, cells were washed with cold PBS and harvested into lysis buffer (150 mM NaCl, 10% glycerol, 0.3% Triton X-100, 50 mM Tris pH 8.0) followed by sonication on ice and centrifugation at 12,000×g for 30 min. Proteins were resolved via SDS-PAGE and transferred to PVDF. Immunoblotting was performed with antibodies raised against and immunospecific for REST (Upstate 05-579), LIN28 (Cell Signaling Technologies #3978, Danvers, Mass.), and beta-actin (MP Biomedicals, Solon, Ohio) and visualized with enhanced chemiluminescence (Thermo Fisher, Rockford, Ill.).

[0146] The results show that when REST was knocked down and lost from the LIN28 RE1 site, LIN28 expression increased in both cell lines (as shown in FIGS. 17C and 17D). Given the role of LIN28 in suppressing maturation of let-7 family miRNAs, it was expected that the let-7 target genes c-Myc and Ras would be upregulated upon REST knockdown, and this was confirmed in MCF7 cells (FIG. 17D). These results established that REST was a direct transcriptional repressor of LIN28, and that loss of REST was sufficient to induce aberrant expression of LIN28 and two of its oncogenic target genes, c-Myc and Ras.

[0147] REST knockdown also increased migration in MCF7 cells in a LIN28-dependent manner. The migratory capacity of shCon and shREST MCF7s were examined by a modified Boyden chamber assay. Serum-starved MCF7s were allowed to migrate for 24 hours across a filter with 8 μm pores towards 10% FBS. MCF7 cells were serum-starved (0% FBS) overnight, and then 5×10⁴ cells were seeded into a modified Boyden chamber and allowed to migrate across a filter (8 um pore size) towards media containing 10% FBS for 24 hours. Cells that did not migrate were removed with a cotton swab and filters fixed in methanol at −20° C. prior to staining with Hoechst 33258 (0.5 μg/ml, Sigma Aldrich, St. Louis, Mo.). Nuclei of migrated cells were photographed at 20× magnification and counted using NIH ImageJ.

[0148] shREST cells showed an increased migratory capacity relative to shCon cells (FIG. 18A, p=0.025). To evaluate the contribution of LIN28 to migration in shREST MCF7s, cells were further infected with a lentiviral construct expressing an anti-LIN28 (+shLIN28) or control (−shLIN28) shRNA and the migration assay was repeated. It was found that knockdown of LIN28 in the shREST background reduced the migratory capacity of these cells (p currently =0.046).

### Example 8

### Increased LIN 28 Expression Contributes to RESTless Tumor Formation and Increased LIN 28 Expression is Observed in RESTless Breast Tumors

[0149] To determine whether upregulation of LIN28 observed in shREST cells contributed to tumorigenicity of RESTless cells in vivo, tumorigenicity of shREST cells with and without increased LIN28 expression was compared. shREST MCF7 cells expressing a control (−shLIN28) or anti-LIN28 shRNA (+shLIN28) were injected subcutaneously into the flanks and mammary fat pads of athymic nude mice as described above. After 100 days, 50% (6/12) of control mammary fat pad injections had given rise to tumors, compared with only 8.3% (1/12) of fat pads injected with LIN28 knockdown cells (p=0.024, results shown in FIG. 19A). The tumor burden in the mammary fat pads was also significantly decreased when LIN28 was knocked down, with a total tumor volume of 345mm³ for control compared to only 56mm³ for LIN28 knockdown tumors (p=0.037, FIG. 19B).

[0150] Overall, by 100 days post-injection, 42% (10/24) of control injections had given rise to measurable tumors (>3 mm in diameter), versus 12.5% (3/24) of LIN28 knockdown injections (FIG. 19C, p=0.03). The tumor burden was also significantly larger for tumors expressing LIN28 relative to their +shLIN counterparts (p=0.02, FIG. 19D). Thus, LIN28 expression is required for the enhanced tumorigenicity of shREST cells.

[0151] To determine whether these in vitro and in vivo findings regarding the contribution of LIN28 to RESTless MCF7 tumorigenicity had potential clinical relevance, LIN28 expression in tumors from human patients with RESTless breast cancer was assessed. As previously described in Wagoner et al., 2010, PLoS Genet, 6: e1000979, bioinformatic analyses on the microarray data were performed using BRB-ArrayTools v3.7 (developed by Dr. Richard Simon and BRB-ArrayTools Development Team) and MultiExperiment Viewer 4.5.1. Tumor gene expression data were obtained from the NCBI Gene Expression Omnibus, and identified by their GEO dataset record number. Analysis of dataset GSE6532 was performed to determine the aggressiveness of tumors identified as being RESTless using the gene signature method. All samples from this dataset that included information on duration of relapse-free survival as well as relapse event information were included in this analysis.

[0152] Analysis of publicly available cDNA microarray data from 289 human breast tumors showed that the median expression level of LIN28 in RESTless tumors was greater than the 90^{th} percentile expression in REST-containing (RESTfl) tumors (p=0.024) (FIG. 20). Furthermore, while RESTless tumors in mice showed local invasion into adjacent muscle tissue, in human patients, RESTless tumors show an increased lymph node metastasis relative to their REST-containing counterparts (Wagoner et al., 2010, PLoS Genet, 6: e1000979).

### Example 9

### REST4 Splicing: REST Regulation and the Role of PTB

[0153] To test the hypothesis that REST regulates REST4 splicing, cell lines stably expressing shRNA targeting either REST (shREST) or a non-targeting control (shControl) shRNA were generated. All cells were grown in 5% CO₂ at 37° C. HEK-293 and MCF7 cells were grown in DMEM with 4.5 g/L glucose, 2 mM L-Glutamine, and 10% fetal bovine serum from HyClone (Logan, Utah). T47D cells were grown in RPMI with L-glutamine, 10 ug/mL insulin, and 10% fetal bovine serum.

[0154] Analysis of REST splicing using primers flanking the excluded REST4 N-exon demonstrated that REST knockdown was sufficient to induce inclusion of the alternative exon within the REST coding region in HEK, T47D and MCF7 cells (FIG. 21A). Notably, no such alternative splicing was observed in control cells.

[0155] In addition to REST4 expression in REST knockdown MCF7 cells, heightened expression of the neuronal microRNA and REST target, miR-124 was also observed (FIG. 22). miR-124 levels were determined by quantitative real-time PCR analysis (qPCR) of REST4 performed using a cDNA template generated using the Invitrogen Superscript III reverse transcription system according to the manufacturer's directions. The qPCR mix used was the SYBR qRT-PCR System (Takara) and hREST4 Forward and hREST SV Region Reverse primers were amplified over 35 cycles. Eppendorf Triple Master Polymerase was used to amplify REST using SV+/−primers according to the manufacturer's instructions. Primers used to amplify the exon junctions surrounding introns 1 and 2: hREST SV region forward: (SEQ ID NO: 393, GAGCGAGTATCACTGGAGGAAACATTT). hREST SV region reverse: (SEQ ID NO: 394, ATAGTCACATACAGGGCAATTGAACTGC). Primers used to amplify REST4: hREST4 forward (Used with hREST SV reverse): (SEQ ID NO: 395, CATTCAGTGGGGTATGGATACC) and hREST4 reverse (Used with hREST SV forward): (SEQ ID NO:396, GCTTCTCACCCATCTAGATCAC). Taqman Kit #TM2197 has-miR-124# was used to detect the presence of mature, processed miR-124 according to the manufacturer's instructions.

[0156] As miR-124 was known to regulate polypyrimidine tract binding protein (PTB) expression, and PTB is a repressor of alternative exon inclusion, it was hypothesized that PTB may be involved in regulating N-exon inclusion in REST4 splicing. Two canonical PTB binding sites 5′ and 3′ of the REST N-exon were identified (as shown in FIG. 23). If REST regulated its own splicing via miR-124, REST knockdown should have resulted in a downregulation of PTB protein and decreased binding of PTB to the proposed regulatory regions surrounding the N-exon (Chen et al., 2009, Nat Rev Mol Cell Biol, 10:741-754). This hypothesis was tested by Western blot analysis. Briefly, protein lysates were harvested in Triton lysis buffer with Sigma mammalian protease inhibitor cocktail P8340, sonicated and cleared by centrifugation at 15,000 rpm for 15 minutes. Protein gel electrophoresis (4-20% Tris-Glycine) was performed under conditions of 35 mA for 40 minutes, and thereafter proteins transferred onto PVDF at 23 V overnight. Membranes were blocked against non-specific hybridization using a 5% milk solution used to block and blot the membrane with antibodies to REST (purchased from Millipore, Billireca, Mass., Catalog. #07-0579), PTB antibody (purchased from Abcam, Cambridge, Mass., Catalog. #ab58131), or HRP-HA (obtained from Santa Cruz Biotechnology, Santa Cruz, Calif., Catalog. #sc7392). Decreased PTB protein levels were observed in HEK cells upon REST knockdown was observed (result shown in FIG. 24).

[0157] To determine whether loss of PTB was sufficient to induceREST4 splicing, stable HEK293 and MCF7 PTB knockdown (shPTB) and control cells were generated. REST4 mRNA was increased in shPTB HEK293 and MCF7 cells relative to shControl cells, suggesting that the observed loss of PTB protein may contribute to the alternative splicing (illustrated in FIG. 25). However, the observed increase of REST4 expression in HEK-293 cells expressing PTB shRNA was not sufficient to induce a large shift in the REST:REST4 ratio seen using primers that flank the N-exon (FIG. 26). These results suggested that though PTB may indeed be a repressor of N-exon inclusion, loss of PTB function cannot completely account for the increased expression of REST4 observed with REST knockdown in multiple cell lines. These data are consistent with the knowledge that small alternative exons are inefficiently recognized by splicing machinery, and that de-repression alone is not sufficient to induce cell type-specific splicing (Charlet et al., 2002, Mol Cell, 9:649-658). Rather, it is often the combination of a loss of a splicing repressor and the presence of a splicing enhancer that drives the inclusion of alternate exons.

[0158] The Examples above provide novel studies regarding the self-regulation of REST function by REST4 splicing, including the presence of the neural-specific microRNA miR-124 in breast cancer cell lines that lack REST function. Prior to these studies, no role for miR-124 outside the nervous system has been previously described. Thus miR-124 may play a key role in the neural-specific splicing observed in certain aggressive breast cancers.

### Example 10

### REST Regulates CELF Family Splicing Factors

[0159] To expand the understanding of the splicing factors at play in REST knockdown cell lines, DNA microarray analysis of mRNA from MCF7 shREST and shControl breast cancer cells was performed as described. Stable REST knockdown in HEK-293, T47D and MCF7 cells for microarray analysis was achieved using a Dharmacon SMARTvector lentiviral shRNA delivery system according to the manufacturer's instructions. Briefly, cells were infected in the presence of 8 mg/mL polybrene at an MOI of 5 with virus expressing a non-targeting control or REST shRNA. Puromycin selection was begun 48 hours after infection and maintained during cell expansion and experimentation. SMARTvector Lentiviral Particles (catalog #SH-042194-01-25) towards REST targeted the sequence GCAAACACCTCAATCGCCA (SEQ ID NO: 397), Non-Targeting SMARTvector shRNA Lentiviral particles (catalog #S-005000-01) were used as an infection control. PTB shRNA lentiviral construct was purchased from Open Biosystems (Huntsville, Ala.) catalog number TRCN0000001063.

[0160] HA-tagged lentiviral overexpression constructs were generated from the pSin-EF2-Lin28 plasmid. EcoRI and SpeI digest removed Lin28, which was replaced with an EcoRIx-Met-HA-tag-EcoRI-SpeI insert, where EcoRIx is the EcoRI overhang without the sixth nucleotide of the EcoRI cut site, preventing its digestion. Primers used for this purpose are listed: EcoRx-fMet-HA Tag: (SEQ ID NO: 398, AATTGATGTACCCATACGATGTTCCAGATTACGCTGAATTCATCGATA); and SpeI-ClaI-EcoRl-gaT-AH: (SEQ ID NO: 399, CTAGTATCGATGAATTCAGCGTAATCTGGAACATCGTATGGGTACATC). EcoRI and SpeI forward and reverse primers were used to clone mouse CELF4 and CELF6 coding sequence into the resulting vector.

[0161] For microarray data generation and processing, RNA was extracted using TRIzol (Invitrogen) according to the manufacturer's instructions from four independent plates of each cell line T47D, HEK-293 and MCF7, with two biological replicates of HEK-293 and T47D, and three biological replicates cells expressing REST shRNA and another two biological replicates expressing a non-targeting control shRNA.

[0162] All RNA reverse transcription, amplification and hybridizations were performed as set forth herein. RNA integrity and quality were assessed by comparing 28S/18S rRNA ratio using Agilent RNANano6000 chips on an Agilent 2100 Bioanalyzer. First and second strand cDNA synthesis steps, followed by in vitro transcription, were performed using the Ambion Amino Allyl Messageamp II kit. Cy3 and Cy5 (Amersham) dyes were coupled to the aRNA, with each fluorophore labeling a separate biological replicate, before fragmentation and dual hybridization to Nimblegen HG18 60 mer 385k Gene Expression Arrays (Nimblegen, Cat #A4542-00-01). For dual hybridization, shControl and shREST samples from the same cell line were competitively hybridized. Arrays were scanned on an Axon4000B and gene expression data was extracted, and RMA normalized using software provided by Nimblegen. All bioinformatic analyses were performed using MultiExperiment Viewer v4.6 (Saeed, Bhagabati et al. 2006). Two-class unpaired SAM Analysis was performed using MeV 4.6, and the delta value of 8.170, yielding <1% median false discovery rate.

[0163] Following gene and sample normalization, significance analysis of microarrays was performed to detect genes that were differentially expressed upon REST knockdown (FIG. 27, median false discovery rate <1%). Consistent with the role of REST as a repressor, all of the RNA expression changes observed upon REST knockdown were upregulation events. In all, 118 mRNAs were upregulated upon REST knockdown in MCF7 cells. A series of concentric filters was applied to the 118 upregulated mRNAs to determine which were most likely to be directly involved in the regulation of REST4 splicing. First, microarray data was analyzed from the three cell lines that demonstrated REST4 splicing upon REST knockdown, HEK-293, T47D, and MCF7s with a focus on those genes that were upregulated with REST knockdown in all three lines. The list of gene candidates was further narrowed by selecting genes with known roles in exon inclusion, with particular emphasis on sequence-specific neural splicing factors, such as nPTB and Hu/Elav, as well as NOVA1 and NOVA2 and CELF family members. Of those genes identified, only those genes that had predicted REST binding elements were examined.

TABLE 6
Genes Upregulated in the Absense of Functional REST

| | | Transcript | SEQ ID |
|---|---|---|---|
| Name | Abbreviation | Accession No. | NO |
| Homo sapiens CUGBP, Elav- | CELF4 | NM_020180 | SEQ ID |
| like family member 4 | | | NO: 400 |
| Homo sapiens CUGBP, Elav- | CELF5 | NM_021938 | SEQ ID |
| like family member 5 | | | NO: 401 |
| Homo sapiens CUGBP, Elav- | CELF6 | NM_052840 | SEQ ID |
| like family member 6 | | | NO: 402 |

[0164] CELF6 was the only gene to meet all of the above criteria, including being overexpressed at least 4-fold upon REST knockdown in three independent cell lines (FIG. 28). CELF6 is expressed predominantly in kidney, testes, and brain and it directly binds RNA elements surrounding small exons in pre-mRNA, promoting their inclusion (Ladd et al., 2004, J Biol Chem, 279:17756-17764). Importantly, CELF6 contains a consensus RE1-site, indicating that it is a potential REST target gene (FIG. 28). Publicly available REST ChIP-Seq data suggested that REST strongly binds this CELF6 RE1 site in Jurkat T-cells (FIG. 29) (Johnson et al., 2007, Science, 316:1497-1502). Interestingly, the CELF6 homolog CELF4 was also upregulated more than two-fold in HEK-293 and MCF7 cells upon REST knockdown (FIG. 28), contained six consensus RE-1 sites, and was also identified as a REST target in the REST ChIP-Seq experiment (FIG. 29). Furthermore, CELF5 was also elevated two-fold upon REST knockdown in HEK-293 cells, contains two RE1 sites, and was identified as a REST-bound gene in the ChIP-Seq database (FIG. 29). Importantly, all of the RE1 sites found in these CELF genes were highly conserved between human, mouse, and rat genomes (UCSC Genome browser, data not shown). Together, these data suggest that multiple CELF family members may be directly regulated by REST function.

[0165] To verify the findings of the ChIP-Seq experiment, REST ChIP qPCR experiments were performed with chromatin from MCF7 cells to examine REST binding at the strongest and the weakest RE1 sites in CELF4, as predicted by ChIP-Seq read frequency. REST ChIP followed by qPCR showed 80-fold and 800-fold enrichment for REST immunoprecipitation over IgG at the first RE1 site in CELF4 intron 1 and the double RE1 site in intron 7, respectively (FIG. 30). The RE1 site located in intron 7 contains two consensus REST binding elements sites separated by six nucleotides. RE1 sites located so close together often show synergistic binding, which likely accounts for the strong affinity observed at those elements. Importantly, CELF4 mRNA levels were upregulated in breast tumors with low REST function (RESTless) with respect to their normal, RESTfl, counterparts (FIG. 31). These data identified CELF4 as a likely REST target gene, and its heightened mRNA level in RESTless tumors was likely due to the lower REST function in these cells.

[0166] Overexpression of either CELF4 or CELF6 resulted in a dramatic shift in REST splicing in multiple cell systems (FIG. 32). Expression of HA-tagged CELF6 resulted in 15-fold and 24-fold increases in REST4 levels in MCF7 and HEK-293 cells, respectively. Similarly, expression of HA-CELF4 in HEK-293 cells resulted in a 49-fold increase in REST4 levels. These data demonstrate that overexpression of CELF4 and CELF6 was sufficient to induce REST4 splicing, indicating that their expression in RESTless tumors may contribute to the heightened levels of REST4.

[0167] Prior to these studies, little work has been done investigating the signaling pathways surrounding REST4 splicing, and to date, no splicing factors have been directly linked to the alternative variant. The present studies identify one likely repressor of REST4 splicing, PTB. In two different cell systems generated herein it is shown that knockdown of PTB is sufficient to induce a moderate increase in REST4 splicing.

[0168] These studies suggest that REST regulates the expression of multiple CELF family members, including CELF6, CELF4, and possibly CELF5. All three of these family members are closely related to one another, and are, in many senses, functionally redundant (Barreau et al., 2006, Biochimie, 88:515-525). CELF4-6 all have the ability to enhance the inclusion of the cTNT exon 5, and CELF4 and CELF6 have also been shown to regulate exon 11 exclusion in the insulin receptor (Barreau et al., 2006, Biochimie, 88:515-525). Here it is shown that overexpression of CELF4 and CELF6 is sufficient to drive REST4 splicing in vitro.

[0169] PTB and CELF-family splicing factors are known to dynamically antagonize one another in the regulation of multiple genes, including cTNT. Given that PTB knockdown and CELF4/6 overexpression both upregulate REST4 levels in multiple cell systems, it is predicted that similar antagonistic regulation of the N-exon may exist. These studies suggest PTB, CELF4 and CELF6 as a potential regulators of N-exon inclusion in REST mRNA processing. Intriguingly, it was found that positive and negative effectors of N-exon inclusion are themselves regulated by REST function. Paradoxically, the result of this is that REST functionally regulates its own splicing, which in turn regulates REST function, creating an interesting feed-forward loop that likely plays a critical role in aggressive breast cancer.

[0170] In addition, the invention is not intended to be limited to the disclosed embodiments of the invention. It should be understood that the foregoing disclosure emphasizes certain specific embodiments of the invention and that all modifications or alternatives equivalent thereto are within the spirit and scope of the invention as set forth in the appended claims.

The application's sequence listing, which the Patent Office published only in electronic form, follows.

SEQUENCE LISTING (402 sequences)

SEQ ID NO: 1 - DNA, 3249 bp, Homo sapiens
atgtcggccgcccccgcctacagcgaagacaagggcggctccgctggccccggggagcccgagtacggccacgaccccgcgagcggcggcatcttctcctccgactacaagcggcatgatgacctgaaggagatgctggacaccaacaaggattctctcaagctggaggccatgaagaggattgtggcgatgattgcccgaggaaagaatgcttcagacctgtttcccgcggtggtgaagaacgtggcctgtaagaacatagaggtgaagaagcttgtctatgtgtacctggtacgctacgctgaggagcagcaagacctggccctgctgtccatctccaccttccaacgtggcctaaaggatcccaaccagctgattcgtgccagtgccctccgtgtcctctctagcatccgtgtgcccatcatagtgcccatcatgatgctagctatcaaggaagccgcctcggacatgtcaccctatgtgcggaaaacagctgcccacgccatccctaaactctacagtttggactctgaccagaaggatcagctgatagaagtcattgagaagcttctggctgacaagaccacgctggtggcgggcagtgtggtgatggcctttgaggaggtctgcccggagcgcatcgacctgattcacaaaaactaccggaaactctgtaacctgctgatcgacgtggaggagtggggccaggtggtcatcatcagcatgctcacccgctacgcccgcacgcagttcctgagccccacccagaacgaatccctactagaggagaacgcggaaaaagccttctacggctcagaggaggacgaggccaagggcgcggggtctgaggagacggccgccgcggccgccccctcccgaaagccctatgtcatggaccccgaccaccggctgctgctgcgcaacaccaaacccctgctgcagagccgcagcgccgcggtggtgatggcggtggcgcagctctacttccacctggcgcccaaggcggaagtgggcgtcatcgccaaggcgctggtgcgcctgctgcgcagccacagtgaggtgcagtacgttgtgctccagaacgtggccaccatgtccatcaagcgccggggtatgtttgagccctacctgaagagcttctacatcaggtccaccgaccccacccagattaagatcctgaagctggaagtgctgaccaacctggccaatgagaccaacattcctactgtcctacgggaattccagacctatattcgcagcatggacaaggactttgtggcagccacaatccaggccattggacgctgtgcaactaacatcggccgagtccgtgacacctgcctcaatggcctggtgcagctgctgtccaaccgtgatgagcttgtggttgcagagtcagtggtcgtcattaagaaattgctacagatgcagccagcacaacatggagagatcatcaaacacttggcaaagcttacagacaacatccaggtgcccatggcccgagccagcatcctgtggctcatcggagagtactgtgagcatgtccccaggattgcacctgatgtcttaagaaaaatggccaagtcattcacagcagaggaggatattgtcaagctgcaggtcatcaacctggcagccaagctctacctgaccaactctaaacagaccaagctgctgacccagtatgtgctgagtctggccaaatatgaccagaactatgatattcgcgaccgggcgcgcttcacccggcagctcatcgtcccttccgagcagggtggggccctcagccgccatgccaagaagctcttcctggcacccaaaccagctccagtcttggagtcatccttcaaagaccgggaccacttccagctgggctcactgtcccacctgcttaatgccaaggccacaggctaccaggagctcccagactggccggaggaagccccagacccatctgtgcgcaacgtggaggtacctgaatggaccaagtgctcaaatcgggagaagagaaaggagaaggaaaaacccttctactcggactctgagggggagtcaggccccacggagtccgcagacagtgaccctgagtctgagagtgaatcggacagtaagagcagcagtgagagcggctctggggagtccagcagtgagtccgacaatgaagaccaggatgaggatgaggagaaagggagaggcagtgagagtgaacagagtgaggaggatggtaagaggaagacaaagaagaaggtgccagagagaaaaggagaagcgtcatcctctgatgagggcagcgattccagcagtagctcatcagagtccgagatgacatcggagtccgaggaggagcagttagaacctgcctcctggagcaggaaaacacctcccagcagcaaaagtgctcctgcaaccaaggagatctccctgcttgatctagaggatttcacccctcccagtgtccagcctgtgtctcccccagcaattgtgtctaccagtctggctgctgacctggagggcctgacactcacagactccaccctggtaccgtcgcttctgagtccagtatcgggtgttgggcggcaggagctgctgcaccgggtagctggcgaggggctggctgtggactacaccttcagccgccaacctttctccggggatccccacatggtgtccgtgcacatccacttctccaacagctctgatacccccatcaagggcctgcatgtgggcactcccaaactgcctgctggcatcagcatccaagaatttcccgaaattgagtccctggcacctggagaatctgccactgctgtaatgggcattaatttctgtgactcaacccaggcagccaacttccagctgtgcacccagacccgacagttctacgtctccattcagccacctgttggggagctgatggcccctgtgttcatgagtgaaaatgagtttaagaaggaacagggaaagctgatgggcatgaatgagatcacagagaaactcatgctgccagacacctgtcggagtgaccacattgtggtgcagaaagtgactgccactgccaacctgggtcgtgttccttgtgggacatctgatgagtacaggtttgcagggaggacactgactggtggaagcctcgttctgctgaccctggatgcccggccagctggagctgcccagctgactgtcaacagcgagaaaatggtgattggcaccatgctggtaaaggatgtgatacaggctctgacccagtga

SEQ ID NO: 2 - DNA, 15964 bp, Homo sapiens
gagccgagctgggagatggcggcggcagcggcggcgccgagagtgtgagcaccgcccgggagccgccggcccgggcgcagcgcgaccccgaccccgcccgcccgcctgcccgccatgggcaacgaggtcagcctggagggcggcgctggcgacgggccgctgccgcccggcggcgccggccccggcccgggccccggccccggccccggcgcaggaaagccgccttcagcaccggccggtggcggacagctccccgcggcgggagcagcgcggtcgaccgcggtaccaccggtccctggccccggccccggccccggtcccggccctggcccgggcagcacttcccggagactggaccccaaggaacccctgggtaaccagagagcagcttccccaactccgaagcaggcttctgctaccactcctggccatgagagcccccgagagacaagggcacagggaccagcaggccaggaggctgatggtccccgcaggacgctgcaggtagacagcaggacacagagatcagggcggtccccctcagtgtcaccggacagaggcagcacccccacatcaccctactccgtccctcagatcgccccccttcccagcagcacgctgtgtcccatatgcaagacttcggacctcacgtcgacccccagccagccaaacttcaacacctgcacccagtgtcacaacaaggtctgcaaccagtgtgggttcaaccccaaccctcatctcacccaggtgaaggagtggctctgtctgaactgtcagatgcagagggctctgggaatggacatgaccactgcacctcgctccaagagccagcagcagctgcactccccagccctgtctcctgcccactccccggccaaacagcccctggggaagccagaccaagagagatctcggggcccaggaggaccacagcctgggtcccgccaggctgagacagccagggccacctcagtgccggggcctgcccaagcagctgcccctccagaggtggggagggtgtctcctcagccccctcaacccaccaagccttccacagctgagcccaggccacctgcaggagaggccccggccaaaagtgccaccgcagtgcccgctgggcttggtgccactgagcagacccaggagggcctcactggtaagctcttcggccttggcgcgtcactgctaacccaggcgagcaccctcatgtctgtgcagcccgaggctgacacccagggccagcctgcccccagcaaggggacacctaagatcgtcttcaatgatgccagcaaggaggctggcccaaaacccttgggctcagggcccgggcctgggccagcacctggagccaaaactgagcctggggctagaatgggtcctggatctggacctggagccctgccgaaaactgggggaacaaccagtccaaagcatggcagagcagaacatcaggcagcatcgaaggctgctgccaagccaaagaccatgccgaaggaaagggccatctgcccactgtgccaagccgagctcaacgtgggcagcaagagcccagccaactataacacatgcaccacctgcaggctccaggtgtgcaacctgtgtggcttcaacccaacaccccacctggtggagaaaacagagtggctctgtctgaactgccaaaccaagcggctactggagggcagcctaggagagccgacccccctgccgccgcccacctcacagcagccccctgtaggggcccctcaccgtgcatctggaacatcccctctgaagcagaaagggccacaggggctgggccagccttcaggccccctgcctgccaaggccagccctctatccaccaaggccagccctctgcccagcaaggccagcccccaggccaagcccctcagggcttctgaacccagcaagaccccaagcagtgtccaggaaaagaagacccgagtccccactaaagctgagcccatgccgaagccacctccagagactaccccaacccctgcgactcctaaagtaaagagtggggtgaggagggctgaacctgccacccctgtcgtcaaggctgttccagaagcccccaagggtggggaggcggaggacctggtgggcaagccttactctcaggatgcgtctcggagcccacagagcctcagtgacacaggctattcctctgacggcatctctagctcccagagtgagatcacaggagtcgtgcagcaggaggtggaacagctggacagtgcaggggtgacagggccacatccacccagcccctccgagatccacaaggtggggagcagcatgcggcctttgctgcaggcccagggcctggccccaagtgagcggagcaagccactctccagcggtactggcgaggagcagaagcagcggccccactccttgtccatcacgcctgaggcctttgactctgatgaggagctggaggatatcctggaggaagacgaagactctgctgagtggaggcgccggagagagcagcaggacactgccgagtcctcagacgactttggcagccaattgaggcacgactatgtggaggacagcagtgagggtggcctgtcccctcttccaccccagcccccagcccgggcagcagaactgactgatgaggatttcatgcgacggcagattctcgagatgagcgccgaggaagacaacctggaggaggatgacactgccacctccgggcgtggcctggccaaacatggcacccagaaaggtggccccagacccaggcctgagcctagccaagaaccagcagcactgcccaagaggcgcctgccccacaatgccaccacgggctatgaggagctgctccctgagggaggctcagcagaggctaccgatggcagtgggaccctgcagggtgggctccgtcgcttcaagaccattgagctcaacagcacgggaagttatggtcatgagttggacctgggccaaggcccagaccccagtctggaccgggagcctgagctggagatggagagcctaacgggctcccctgaggaccgctcccgtggtgagcactcctctacattgcctgcctccacacccagctacacctcgggcacctctcccacctctctgtcctccctagaggaggacagtgacagcagccccagccgcaggcagcgtctagaagaagcaaagcagcagcgcaaggcccggcaccgctcccacgggcccctgctacccaccatcgaggactcctcagaggaggaggagctgcgggaggaagaggagctgcttcgtgagcaagagaagatgcgggaggtggagcagcagcgcatccgcagcacggcccgcaagacccggcgggacaaggaagaactgcgggcccagcggaggcgagagcgctccaagacaccacccagtaacttgtcacccatcgaggatgcctccccgacggaggagctgaggcaggcggccgagatggaggagctacaccgctcctcctgctctgagtactcaccctcaccctcccttgactctgaggctgaggccttggatggtggccctagccggctttacaagtcaggcagtgagtacaacctgcccaccttcatgtccctctactcaccaaccgagacaccctccggcagctccaccactcccagttccggacggccgctcaagagcgctgaggaggcttatgaggagatgatgcgcaaagctgagctgctccagaggcagcaaggccaggcagcaggggcccggggaccccatggcggcccctctcagcccacaggcccccggggcctgggctccttcgaatatcaagacactacagaccgtgagtatggccaggctgctcagcctgccgcagagggcacgccagccagcctgggagcagccgtgtacgaagaaatccttcagacatcacagagcatagtccgcatgcggcaggcctcctcacgagacctggcttttgctgaggacaaaaagaaggagaagcagtttctaaatgctgagagtgcatacatggacccaatgaagcaaaatggtggcccccttacccctggtaccagtcccacccagctcgctgcccctgtgtccttctctacccccacctcctcagacagcagcgggggccgagttattcccgatgtccgtgtcactcagcattttgcaaaggagactcaggaccccctcaagctgcacagctctcctgcctcccccagctcagcctccaaggagataggcatgcccttttcccagggccctgggaccccagccaccacagctgtggctccttgtccagctgggctgccacgaggatatatgactccagcctccccagcaggctccgagcgtagtccttcaccatcttccacagcccacagctatggacacagcccaaccactgcaaactatgggtcccaaactgaggatctaccccaggcccccagtggccttgctgcagctggacgagctgctagagagaagcccttgagtgcgagtgacggtgagggtggcactcctcagccttcccgggcatattcctactttgcaagctccagcccacctctctccccgtcttccccctcagagagtcccacattctcccctggcaagatgggcccaagggccacagcagagttctctacacagacgccaagtccagcccctgcctcagacatgccacggagccctggtgcccccactccatcacctatggtagcccagggtacacaaacaccacatcgacccagcacgcctcgcctggtgtggcaggagtcctctcaagaggctccctttatggtcatcacgctggcatctgacgcctccagccagaccaggatggtacatgccagtgcctccacctccccgctctgctcacctactgaaacccagcccaccacccatggctacagccagacaacacctccgagtgtgtctcagctgcccccagagccacctgggccacctggctttccacgggtgcccagtgctggtgcagatgggcccctggcactatatggctggggtgccctccctgctgagaacatctccctgtgccggatctcctctgtccctgggacgtctagggttgagccaggccccaggacccctggcactgcagtggtagacctccgtacagctgtcaagcccactcccatcatcctcactgaccagggcatggacctcacctctcttgctgtggaagcgaggaagtatggtcttgccctggatccaatcccaggacggcagtcgaccgccgtgcagcccttggttatcaacctcaatgcccaggagcataccttccttgctactgccaccaccgtgagcatcaccatggcctcgtctgtgttcatggctcaacaaaagcagcctgtggtctatggagacccctaccagagccgccttgactttggccagggtgggggtagccctgtgtgcctggcccaggtcaaacaagtagagcaggctgtccagacagccccataccgaagtgggccccggggaagacccagggaggccaagtttgccagatataacctacccaaccaagtagctcctctggccagaagagacgttttgatcactcagatgggcaccgcccagagcattggcctcaagccaggcccagtgccagagccaggtgccgagccccaccgggccacccctgcagagctgcggtcacatgctctgccaggtgccaggaagccacacacagtggtggtgcagatgggagagggcacagcaggcactgtgaccacactgctcccagaggagcctgcgggtgccctggaccttaccgggatgaggcctgagagccagctggcatgctgtgacatggtctacaagctcccctttggcagcagctgcactggcaccttccacccggcccccagtgtgcctgagaagagcatggcagatgctgccccacctggccaaagcagcagccccttctatggtccccgggaccctgagcctcctgagcccccaacctaccgggcacagggggtggtggggcctgggccccatgaggagcagaggccctacccacaaggcctgcctggtaggctgtactcctccatgtctgacaccaatttggctgaggctggcctcaactaccatgcccagaggatcgggcagctcttccagggtcctggacgagactcggctatggacctcagctcactgaagcactcctacagcctgggctttgcggatggacgctacctagggcagggcttgcagtatggctcagtcacggacctgcgtcatcctacagaccttttggctcacccgcttcccatgcggcgctatagctcagtgtcgaacatctactcagaccacaggtacggcccacggggagatgcagttggcttccaggaggccagcctggcccagtacagtgccaccacagcccgtgaaatcagtcgcatgtgcgctgccctcaactccatggaccagtatggtgggcggcatggcagtggtggtggtggccctgaccttgtgcagtaccagccccagcacgggcccgggctcagtgctccacagagtctggttcccctcagacctggactccttggtaaccccacctttccagagggccacccaagtcctgggaacttggcccagtatgggcctgcagcaggccaaggaacagcagtcagacagctgctgccgtccacagccactgtacgtgcagctgatggcatgatctactcgactatcaataccccaattgctgcaacactgcccatcaccacccagcctgcctcagtcctgcggcccatggtgcgtggtggcatgtacaggccttacgcatctggtggaatcacagccgtgccactcaccagtctgacacgtgtgcccatgattgccccccgggtacctcttggacccacagggctgtaccgctatcctgcaccaagtagatttcccattgcttccagtgttccacctgcagaagggcctgtctatctggggaaacctgctgctgccaaggcccctggggctgggggcccttcaaggccagagatgccagtaggggctgcacgggaagagcctcttcccacaaccacccctgctgccatcaaggaggctgcaggagccccagctcctgccccactagctggccagaagccaccagcagatgctgctcctgggggtggcagtggggccctcagccggccagggttcgagaaagaggaagcatcacaggaggagaggcagcggaagcaacaggagcagctgctccagctagagcgggagcgggtggagttggagaagctgcgacaacttcggctgcaagaggagctagagcgggaacgtgtggagctgcagaggcaccgtgaggaggagcagctgctggtgcagcgggagttgcaggagctgcagaccatcaagcaccatgtgctgcagcagcagcaagaggaacgccaggctcaatttgcactgcagcgggaacagctagcgcagcagcgtctgcagctggagcagatccagcagctgcagcagcagctgcagcagcagctagaggagcagaagcagcggcagaaggctccctttcctgcagcctgtgaggcacctggccgagggcctcccctagcggctgctgagttggcccagaatggccagtattggcccccccttacacatgcagccttcattgccatggcagggcctgaaggacttgggcagcctcgtgagcctgtgctgcaccggggtctccccagctctgcctcagacatgtcactgcaaacggaggagcagtgggaggccagccgtagtggcatcaagaagcggcactccatgccacgcctgcgggatgcctgtgagctagagtctgggactgagccctgtgtggtcaggaggattgccgacagcagcgtgcagacagacgatgaggatggggagagccgctacctcttgagtcggcgacgccgggcacggcggagtgctgactgcagtgtgcagacggacgacgaagacagtgctgagtgggagcagccagtgcgccgccgcaggtctcgtcttccccgccactcagactcaggctctgacagcaagcacgatgccactgcctcatcatccagtgctgctgccactgtgagggccatgagcagcgtgggcatccagaccatcagtgactgctccgtgcagacggagcctgaccagctgcccagggtctctccagccatccacatcacagctgccaccgatcccaaggtggagatcgtcaggtacatatcggcgccagagaagactgggcgtggggagagcctggcctgccagacggagccagatgggcaggcccagggtgtagccgggccgcagcttgtagggccaactgccatcagcccctacctgcctggcatccagatcgtcaccccagggcctctgggcagatttgaaaaaaagaagccagatcccctggagattgggtaccaggcccacctgcctccggagtctctctcacagcttgtgagccgccagcctcccaagtcccctcaggtcctctactcaccagtctcacccctgtcccctcaccggctcctggacacctcctttgcttccagtgagaggctgaacaaagctcacgtgagtccccagaagcacttcacggctgacagcgctctccgccagcagacgctgcctcgccccatgaagaccctgcagcggtccctgtctgaccctaagcccctcagccccaccgccgaagagtctgccaaagagagattctccctctaccagcaccaggggggactgggtagccaggtgtcggcgttgccacccaacagcctggtccgcaaggtgaagcggacactgcccagcccccctccagaggaggctcaccttcccctggctggccaggcctccccacagctgtatgcagccagcctgctgcagcgagggctgacggggcccaccactgtccctgctaccaaggccagcctgctccgggagctggaccgggacctgcggctggtggagcatgagtccaccaaactgcgcaagaagcaggcagagctggatgaggaggagaaggagattgacgccaagctcaagtacctggagttgggtatcacacaacgcaaagagtctttggccaaagaccggggtggccgtgactacccacccttgcgtggtcttggcgagcatcgtgactacctatcggacagtgagctcaaccagctgcggctccagggctgcaccactcccgctggccagtttgtggacttccctgccactgccgctgctcctgccaccccctctggtcccactgccttccagcagccccgcttccagcctccagccccacagtattctgcaggcagtggtgggccaactcagaacggattcccagcccaccaggcccccacctaccctggccccagcacgtacccagctcctgcctttcctcctggtgccagttacccagctgagcctggcctgccaaaccagcaggctttccgccccacaggccactatgcaggccaaacacccatgccaaccacacagagcaccctttttccagtccccgctgatagccgtgccccactgcagaagccacgccagacatcgctagccgacttggagcagaaggtgcccaccaactatgaggtgatcgccagccccgttgtgcccatgtcttcagccccatctgaaaccagctacagtggcccagcagtgagcagcggctatgagcagggcaaggtccctgaggtgccccgggctggtgaccgtggcagtgtgagccagagcccagcccccacctacccctctgactcacactataccagtctggagcagaacgttcctcgaaactacgtaatgattgatgacatcagtgaactgaccaaggacagcacctctactgctcctgatagccaacggctggagcccctggggccaggcagcagtgggcgtccagggaaggagcctggagaaccaggtgtccttgacgggcccacactgccctgctgctatgccagaggagaagaggaatctgaggaggactcatacgatccccgcgggaagggtggccacctccggagcatggagagcaatggtcgaccagccagtacccactactatggtgacagtgactacaggcatggggctcgagtagagaagtatggtccagggcccatggggcccaagcatccctccaagagcctggctccagctgccatctcctcaaagcgcagcaagcaccggaagcagggcatggagcaaaagatatccaagttctcgcctattgaagaggccaaagacgtagagtcagacctggcgtcctaccccccacctgcagtcagcagcagcctggtctctcggggcaggaagttccaggatgaaatcacctatgggctcaagaagaacgtgtatgagcagcaaaaatactatgggatgtccagccgggacgcagtggaggacgaccgcatttatggcgggagcagccggtcccgggcaccttctgcatacagtggggagaagctgtccagccacgacttcagtggctggggcaaggggtacgaaagggaacgggaggctgtggagcgacttcaaaaagcgggccccaagccctcatccctaagtatggcccacagccgggtacgaccccccatgcggagccaggcctctgaagaggagagccccgtcagtcctttggggaggccccgccctgccggagggcccctccctcccggcggggatacctgcccacagttctgctccagccactccatgcctgatgtccaggaacatgtcaaggacggacctcgggcccacgcatataagcgtgaggagggctacatcctggatgattcccattgcgtggtttccgacagcgaagcgtatcacctgggccaggaggagacggactggtttgataagccccgggatgcccgctctgaccggttcaggcaccacgggggccatgcagtttcctcctcctcccagaagcgaggccctgccaggcacagctaccatgactacgatgaaccccctgaggagggcctgtggcctcatgatgagggtggcccaggccgccatgcctcagccaaggaacaccggcacggtgaccacgggcggcactcaggccgccacactggtgaggagccgggacggcgtgctgccaaaccacacgctcgggacctgggtcgccatgaggcccggccccactctcagcccagctctgctccagctatgccgaagaagggtcagcctgggtatcccagctctgctgagtactcacagccatcccgtgcttcatccgcataccatcatgcctctgacagcaagaagggctcccggcaagcccactccgggcccgctgcactgcagtcaaaggcagaaccccaggcgcagccgcagctgcaaggtcggcaggcagctccaggaccacagcagtcacagtcaccatcatccaggcaaataccctctggggcagcatcacgccagccacagacacagcagcagcagcaaggtcttgggctgcagcccccacagcaggctctgacacaggctcggctgcagcaacagagccagccaaccacccggggctcagcccctgctgccagccagcctgcagggaagcctcagccaggccccagcacagccacaggtcctcaaccagcaggaccgccacgggcagaacagacaaatggctctaaagggacagccaaagcaccgcaacaggggagggctcctcaggcccagccagcaccaggacctggacctgcaggtgtgaaggctggagccaggcctggaggaaccccaggggctcccgccggccagccaggtgccgatggggagagcgtgttctccaagatcctccctggcggggcagccgagcaagctggcaaactgacggaagctgtctctgcttttggcaaaaaattttcctcattctggtgaccatgcccagcatggctcttgaagaaatgaagagaggtatcattgctgtggaaaaatctctggagtcagaggcctgggcgcagctctggactctgcgtataacacatctacaatctggcaaacccttggcccaaagactcaccaggtgggacgtggcaggcaggcctcagttgaggacgtgatgttttctcacagcagctgcctgggtgaagcatctgctggacaagtcggaccactggccaggggacctttgattgtctttccagagatgctgctctctgcagggcaccaccttcaaggcacagcccttgttgggagggagaaccctctccagaaaccctgccaccatggtgtcttgccgtacttcccacagccgcctttttgcggcctggccggccaggcttcccgtgcgttatacacagagtttgggcacacactgccctccctccgagatgccagaagtttttccacagccttggagaggggctttgactgagggctgggggccctgggctccgtttccttcacattccagctggcccggatccctctgtggcacagggccctgcccgtcacatgccctctgggtgacatcggagcagacctccatgtggccaggggttgggagaactttacaaacattaggacctaacactgtctcatcgctgaaataagaggccatagcaccgaaaagcagcgtgggcgccggctgaggcttctcccagcccgtgggtggcagcgtgctagcacactgccaccatctcaaagccatccccctagccatcgtgagcatcccagcggcaccgccattgtctcaaccagccggctcctcgtctgtacacctggggatttcttttgatttcaagaacagccttaatcattccagtttgatttacgtgtatacctcataaacatttttcttttgtttctctctccccctttctctcttctcttggctcactcccttgcctctccccctccaccaccaccttgtgactgatggtttggtttcctctctgctctgcccctgctcagcacagggagaatgttgacttagaagcaatagggggcagcaggccaccaagagcacaaccccagggcgaggtctggggaggcctcccagcccgcctctgtttactgtgcaattccagtcgttcttaagccatcaccagtgggtgtactcagagcagaggggccaggacttctgccagccaagggaaaggcccagagccctgtgcgggggaatgtggcactgtctatccatccggtggactgggcagcattcctccccagggctcttcccttgggggcctcctttcatctggggcacagccacaagtctcatctctaacgttctatgcaatgaaatataaaccctcaatgacaactgttaatatttaataaattccatgttatgtataaggagttaattgcaaacatgcaattgagaaactggatagatacactcataaaacccccacccctccccaccccacccctgctcccattgtgtgtgtgaaattctcagtctgtggcatgtttgacctgtggcaggactcgctgctgccaggtgagtcaccgcctgtcctgcagtggagcatgcacagctcgcagcctctttgcacgatttcatccattttaaatgcttgaccctcttgcttggagttctttttgcctcagaacctctccttcaggagcacttctagctgacttctgcacaagctagtgaggacctgccagaattgttgcctgagcgtgccaggctgcagggcaggcagtaaaaggcccccacataccctgcagttttctctgtccaggacagcaggtaaaaaggaatccccagagcagacgcaatggtaggagcctgcacaggatgtgtgtgtatggacattctgaaggtttgctgtaggatatctgtctgtctgtcattttcccttcctaccccaaccctgagccagaggcatctgacagccctttcccagagggcaccacgcaagggcagagctgggcggcatccacagccagagaggcagaggcaagagcagagccaggctgtgcccgagggaccccagctcttgactgcacctgtttcatgcctctcctctgtggctaggaggctcaaaggactgtgagccaggagatctgggctggagctagggggtcaatggatgctcaggaagagctgggcctttggcacttgtggtgagaacagttgacagtggtcatctggaactgttcatataaacagtggcttcaagctaagtttcttgtgaagtttctcaatagcaaatcttacagaaggtcctgtgtgaccctctctgcatctgtccccaggacctatgctccctgctcacccccttctccaaagcccaagcgtcccgctgctcatcagcttttttaccattgagccaggagtgcggcaggcagtacctgcctgacccttcaaggcctgaccttcgtccagagtgctctggtttgcaccatgcatttctcaggggtccgcatttctcatgcttttctataagatctacacaccccttcagagagggctcctcgctcacctctggtagctatggatgggacaggaagctgccaacctttgtgttggacttaacacccttgcctttctgggacttggcctcaccccacccatggaatacctgcctcatcccaaagatcaggtatgggctgaatgcagccatctgagcaagggctgagggaagccatcacctaacacctctggccacccaggaccaggtctgtgtggggatgtgccttggagaccaaggcaatagtcctttccactacaggccaggggatgggacaagaagtagggaacaggcagggaaatgttaggaggtcagcctccagcaggcctagtctcaggctctaaagtactgacttttcagcaaatttcctttctggccaagccctctgagtttgaaattctgacatctgccactcctcatcccccactgtacccacaggatacatcatcgcccctctgtgaaggtggctggagcaggcctctggtccatggactgtccttcctggcccttgcatggatgcagttgtgactctggggacaatgcagccagaagctgagggaccagcacttggtgccttggaaagtagagagcaacagacacatctccaaatgggcaaggagtctctagcatgcagcccaggccttctccatacccctctccccagcatcatgagcaagggcattgcctcctctctctgctcacttcagggcccagtgcactcacttcacagtgacagccctcccctacaatccttgggcagagcatgtggtctgagggcccacagtgaaagaacagcagtggtggcaactatgccttgccttctggagcctgtagggagttttccaggcaggtcctttgccaggacagcatggtcctgccctgttgtcccgtctgctctcctcttacccacccccatgctgtaaatacttgtcatcatggactccaacagggttagagggacaggcctaatcaactgaaactcctcggagatgccatctctgtctccctgggtgccagcagccctgctgccatgtgcactggggtggcactggagagccatggcagtcgtgagatattgtatgtgtatgcacatgatcatgtgtgtatgtgcgtgcgtgcgtgcgtgtgtgtgtgtgtgtgtgtttctgcctcattcagtttctggggtcaaatcagctccttctctccaagtgcactaccctggagagtggtggccactcaataccttttcctctagctttcatgtcttgtttttgctttccccttcctcctccctctctccctttctttccttctctccttctttatttgaggggggaagagtgctgtacaaagtcaaacaaacaagtttacagttgtaagtgcaatgacccgagtcctccacatgaccttgtgaattgtgtgctgtccttctgtgctctgtgagaactcgtggtacttcagtgtccctccccctgtattgtgacaaggtaattctgtggtatcagaataaaaggacttgatataaacaacctaaaaaa

SEQ ID NO: 3 - DNA, 2034 bp, Homo sapiens
atgcagccaacgctgcttctcagcctcctgggagccgtggggctggcggctgtcaattccatgccagtggataacaggaaccacaatgaaggaatggtgactcgctgcatcattgaggtcctctcaaatgccttgtcgaagtccagcgctccacccatcacccctgagtgccgccaagtcctgaagacgagtagaaaagacgtcaaagacaaagagacaactgaaaatgaaaacacaaagtttgaagtaagattgttaagagacccagctgatgcctcggaagcccacgagtcctccagcaggggagaggcaggagccccaggggaggaggacatccaaggcccaacaaaggcagacacagagaaatgggcagagggaggcgggcacagccgagagcgagcggatgagccccagtggagcctctatccctccgacagccaagtctctgaagaagtgaagacacgccattctgagaagagccagagagaggatgaggaggaggaggagggagagaactatcaaaaaggggagcgaggggaagatagcagtgaagagaaacaccttgaagagccaggagagacacaaaacgcttttctcaatgaaagaaagcaggcttcagctataaaaaaagaggagttagtggccagatcggaaacacatgctgccgggcattctcaggagaagacacatagccgagagaagagtagccaggagagtggagaggagacagggagccaggagaatcacccccaggagtctaaaggccaaccccgaagccaggaagaatctgaggaaggtgaggaagatgccacctctgaggtggacaaacgacgcacgaggcccagacaccaccacgggaggagcaggcccgacaggtcctctcaaggagggagtcttccctctgaggaaaagggacacccccaggaggaatctgaggagtcaaacgtcagcatggccagtttaggggaaaagagggaccaccattcaacccactacagggcttcagaggaagaacctgaatatggagaagaaataaagggttatccaggcgtccaggcccctgaggacctggagtgggagcgctataggggcagaggaagtgaagaatacagggctccaagacctcagagtgaggagagttgggatgaggaggacaagagaaactaccccagcttagagcttgataagatggcacatggatatggtgaagaaagtgaggaagagaggggccttgagccgggaaagggacgccatcacagaggcaggggaggggagccacgtgcctatttcatgtctgacaccagagaagagaaaaggttcttgggtgaaggacaccaccgtgtccaagaaaaccagatggacaaggcaaggaggcatccacaaggtgcgtggaaagagctggacagaaattatctcaactacggtgaggaaggagccccagggaagtggcagcagcagggagacctgcaggacactaaagaaaacagggaggaagctaggtttcaagataaacaatatagctcccatcacacagctgaaaagaggaagagattaggggaactgttcaacccatactacgaccctctccagtggaagagcagccattttgaaagaagagacaacatgaatgacaattttctcgagggtgaggaggaaaatgagctgaccttgaacgagaagaatttcttcccagaatacaactatgactggtgggagaaaaagcccttctctgaggatgtgaactgggggtatgagaagagaaacctcgccagggtccccaagctggacctgaaaaggcaatatgacagggtggcccaactggaccagctccttcactacaggaagaagtcagctgagtttccagacttctatgattctgaggagccggtgagcacccaccaggaggcagaaaatgaaaaggacagggctgaccagacagtcctgacagaggacgagaaaaaagaactcgaaaacttggctgcaatggatttggaactacagaagatagctgagaaattcagccaaaggggctga

SEQ ID NO: 4 - DNA, 948 bp, Homo sapiens
cgaggagaaggacccagacgccgccaagaaggaggaggagcggcaggaggcgctgcgccaggcggaggaggagcgcaaggccaagtacgccaagatggaggcggagcgcgaggccgtgcgccagggcatccgagacaagtacggcatcaagaagaaggaggagcgcgaggccgaggcccaggccgccatggaggccaactccgaggggagcttgacgcggcccaagaaggccatcccgccgggctgcggggacgaggtggaggaggaggacgagagcatcctggacaccgtcatcaagtacctgcccgggccgctgcaggacatgctcaagaagtagccgcgcgcgggacagcggccccgcggagcccccgcccctccccctacagatcctccgcggaggcccctgagggacgagcagagcgcagcccccacgccgatataagccatagccccaggcccgccctgcccgcgcccgccgcctccctcacccggcaaggggcgcgcgcccccaggacccccccagtccgccccgtgctcctctgcccgcgggtggctggagccccatcgcctgggacgcccctttctcttgctgtttaccgcccacccagcagcgcccgaggccagggccgccgaagggcagccccgcgaccacccctgtgcgcgcgttcgcggcggtgggcgcctgtcgggcccgcactcaggagcacagccatagcagacggggggctgcgggcggggcgagggcggcggggcctgggtccccctcctgcacgcggactccggggttcggatcgctccgccgtgagtatttgcgtccgcacgcggccgctctccgccccccggcctggccccctcgcgcccctgtccatccgtctctgtccgcgtcctttcctctcctctctggaaggttttgcttcttacgaacgccacggccgtgttcacttctaa

SEQ ID NO: 5 - DNA, 4726 bp, Homo sapiens
cggcaggcattcgaggcggacagaaacggggcttggcgccccccgcgtgcacgtgtgctagcccaggcaggagggagcgcctcggcggaggagtcaaggaagagggggagggagaaacgcgccagaacctcggcccgggcgccctcgtcggccgcggaggagctgcagcctccaacaggaaggtgtggtccctgccatgctatctgctctgctcagcgactgaaggtgcccgcatcccagctctgccaggaagcaaaggttgtcacatcttcccaagccaggccagccaggagcgctgcatgcaaattctgccgtgggctaaggcacgctaaccagagccggcggcatggacttcgtcatgaagcaggcccttggaggggccacaaaggacatggggaagatgctggggggagaggaggagaaggaccccgacgcgcagaaaaaggaggaggagcggcaggaggcgctgcggcagcaggaggaggagcgtaaggccaagcacgcgcgcatggaggcggagcgggagaaggtccggcagcagatccgagataagtatgggctgaagaagaaggaggagaaggaagcagaggagaaagcagccctggagcagccctgcgaggggagcctgacccggcccaagaaggccatccctgcgggctgcggggacgaggaggaggaggaagaggagagcatcctggacacggtgctcaaatacctgcccgggccgctgcaggacatgttcaagaagtaaccaggcctcctgccccagcctactccacctgttactacttctttttggttctttcttttctttttattaggttaagtctcaattctgaaggggaaaacctcagttggcctctgcccctcttccctggccaggggcttctccccctcagctctccctcacacctcccttcatcccagggtatccacctgcaccccactcccaagtagcttgaaaaagggaggacagtctttccccagcaggggtcaggggggcccctcaggaagcctaaggtcgtgctagtgtggtgacccccatacattcctccctgctccccactgccaggaggaccactgtccccagccagccaaagtaatgacacattccagccctgcccagcatgctgacctttggcctctaaccctcagtgggcccccaggtcagggcaggggcactgagtggcctggctctgaggaagggagtcaggggaagcctgtcccgggaaggcccaggctgagaggccctggctctggccaggctgggatctgggtgggaggctggggctcttcttcttccatctccttggtgacacccagcccaggggcacccccttccccagcccccacctggagagacatggcccctgccaagctggtcccttcaaatggatcctttgtggactttagctcatttgtggaggaaccccaggtagggacgccccttgttcctcacccccaccccacttaggtcctgggcccccactgccaggctgggcccagcttgctcagtcaaggggctgccaggcccccagaaaacacttggagccatcgggtagcgatggtctatgccatggggaacacctccattggtgtggccaagctgcccccattcctatccacccctctccccaccccgtcctgtccatgcgcttccagggccccacggtccccaggaggacgcttcctggccaaagccccaagcctttggtgagaagccaattcccacttgacagaaggcgtccatccattcatctcattggccaaggacaaactctcctctgggacgtctgggactggcatttgtcccccactcaaattatcaaagctttctgctcagtcagttgtgtggggatggtgagggaagaggggtcacatgagggaggaaactgtatccatgcatgcatgataatgcgtggcagagactgcaacagggattgtgtgttcagagatcatatgcatatgtgtagggctggagcgtgtgtgtgtcttgagattgtgtgtgttgcagtcatcatatctatgtgttacagattgtgtatgttagccttgtgtatgtgtgcttgattgaggtggtgtatttgggttgaaattgtgtcatatgtgtgtgctatccatctcgtgtttagaggctgtatatgttagcttgtgtaagaatgtgttttcaaaacagtgtgtgtattgggagtgatgggtatgtgttaggtatgtgatgggttgtagaagcgtgtgtttgagagaattcagagacatttgaaggctgctgtgtgcatgtttgggggtctgaaaagacagttgtgtgcatggatgtgtgcgtggggagaaagaacgtgggtaagatgtcccttcccagccctgagaccactggtcacagttggccacctccaacgggagaccttgtccttggcctagagtcctcccacccttggggggctcctgcctgaggtcctcagaatcccactgcaatggacccaggcagcgccccaggaagccatgctgggcccccgccagggcctatcccaaaagcaggggccagggagggggcgacttgcctgcccctgaagcccttgttcccattggccccagtttgcattctgcaggttttccattttagtgggttctgcttttatttcagagacagacatgtgtcttctctgtccgtttccaataggtaaagccatatcagttagactgcaatactttaaacacgagacaaaacaatccatatgtttagggaaccagaaaagtcccctggtctgtcccttctttggggagcagggcctcgacagctccagctcccttgacctaccttcctccccgcaccccgcccccaccttgtgcccctgtgtccagccccccagggggcctgtgtctgtgtctgtgcctgtgtctgtgatggggagccgcctcgcacccctgttgtctgcttgtctctttgtgtctgttatcctgggcaggatggtcattctcaaaaaccctggggtcctgggccagagacaggcagggcccagtccaggggccccaggcctccccagtcccagtgtgcgagccccacttggacacaagtgttcagagaggtccccctctgccacttgacagggaccttcaaacctcgacagtgatgcaaggacacagagagtaccagataggtagcagagaccaaggcgcagggtgcttcagatgagcaagagaacccagtcgaaccagataccccaggtgggccggagggaccccagaccttcagagggctgccctggtgttctccacagtgcagtccctctgtattcccagagtgggatcggggctttcagccccaccctgatgcctgccctccaggatggctggtttagtctgggtccatgtcccagacccctctattctgctccaggacagcaggacttcaggtcttcctgggggtggatataggagaaaatttctgcctggcacacacctggctccaaccactgccaagtgatcactcttaggcccaggggaacacaatgactatcattactgatgcagacctggctgtggagagcagctaatgtgtggcccagagagcctgtctgtgtggagcacgtagtgcacagaatacgtgagagttgctctggcaggggcagaatcctcacaggatcgcctgggaggtgaggtgtgtgtgacccactggatgggagggcaatgagtgtgcacatacaaatggggcagtgtgcatgcaacacacttaggggaggagtggccccagaattcagcacgcacacaacacacaagggagagaacccccagatgagaaaataggaaggagcaatcatttgtagatgggtgaaaaaagaatgaggttcaagggagcgtgcaccaggtgaggtgagcgtgtgtgctctcagggaagggcccaggatcccatgcctgggaggagctgccagagagaagcaaaaaggcggctgtggatcgccctgggctgggcaccagtgacaggtcaggatctccaaacatggacgtcctcccctccaaatccagaagctcccagaaggtgtccttaactgcaaagctgtgcagggtactcctccagatggaatcaggaagtcgagacaccatcccaggtgtgtgtaagagagagagagagaacagggaggatacagaagtattgcagcccagatcccctatcagggggacagctggtgggcaaagcagccaccccacagccttgtggctagagtacagtggggtagaccctccagccccaatagccctagtacccagctggcagggttgcccacccctgctgtccacctgctccatcctctagggttccacaggcccctgaccgcacagggaggctggggccagcctggtctcccaggcctgaggacatgcctcccaccaaatgtcccctgctccagtcccactcctgtcaccccacgctctgcactggggagaaaacgggaggtgctcgtgctggccctgggtgggagcggggagtcctggtgagaccccggtgagatggaccatcctgcccccgtgggggatcccctttcccacatccgtgctgtgtcattgttgctctgcttcctttcaatgtgtcagtgcctggggggaggggaggagcaccccctcagcccccctgaacctgaccaaaagccatggctgttgctcccccctttgtatgatgcaaatgctgaaatgtacaaaatcaaccatgacaacaaagaaaaagaccttgtacagc

SEQ ID NO: 6 - DNA, 4206 bp, Homo sapiens
atggacggtgacagcagcagcagcagcggcggcagcggtccggctcccggcccgggtccggaaggggagcaacggcccgagggggagcccttggccccagacggcggctccccggacagcacccagaccaaggctgtgccccctgaggcaagcccagagagaagctgctccctccacagctgccccctggaggacccttccagctcttcaggacccccaccaacaacttccaccctccagcctgtgggtccatccagccccttggcccctgcccacttcacctatccccgggcactgcaggaataccaggggggcagttccctgccaggacttggggatcgggcagctctctgctcccacggctccagcctcagcccttctccagccccctcacagcgcgatgggacctggaagccacccgctgtgcagcaccatgtggtcagcgtcaggcaggaacgagccttccagatgccaaagagctattcccagctgattgctgagtggccagtggccgtgctgatgctgtgtctggctgtcatcttcctctgcaccctggctggactgttgggggcccggctgcccgacttctccaagcctttgctgggctttgagccacgggacacagacattgggagcaagttagtggtctggagagcactacaagccctcacaggccccaggaagctgcttttcctttccccagaccttgagctgaacagctcgagctcccacaacactctgaggcctgcacccagaggcagtgcccaggagagcgctgtccggcctcggagaatggtggagcccctggaggacagaaggcaagagaacttcttctgtggcccccctgagaagagctatgcaaagctggtgttcatgtccacctcctcgggcagcctatggaacctgcatgccatccattccatgtgtcgcatggaacaggaccagatccgctcccataccagcttcggggctctgtgccagcggacagcagccaaccagtgctgccccagctggtccctgggcaactatctggctgtgctctccaaccgctcctcctgcctggacactacccaagctgacgcagcccgcacactggccctgcttcggacctgtgccctctactaccacagtggcgccttggtgccctcttgtctgggacctgggcagaacaagtccccacgctgtgcccaggttcccaccaagtgctcccagagtagtgccatctaccaactcctgcactttctgcttgacagggactttctgagtccccagaccactgactaccaggtgccttccctcaagtacagcctgctcttcctgcccaccccaaagggtgcttccctcatggacatctacctggaccggctggccaccccctgggggcttgctgacaactacacctctgtcactggcatggacctgggcctcaagcaggagctgctgaggcacttcctggtccaggacacggtgtaccccttgctggctctggttgccatcttcttcggcatggccctgtacctgcgctcactcttcctcacgctcatggtgctgctgggggtgctgggctcactgctggtggccttcttcctttaccaggtggccttccgcatggcctacttccccttcgtcaatctggcagccctcctcctgctgagcagcgtctgcgccaaccacacgctcatcttcttcgacctgtggcgccttagcaagagccagctgccgtcgggggggctggcgcagcgcgtgggccgcaccatgcaccacttcggctacctgctgctggtctccggcctcaccacgagcgcggccttctatgccagctacctgagccgcctgccggccgttcgctgcctcgccctcttcatgggcacggctgtgctggtgcacctggcgctcacgctggtctggctgcccgcctccgccgtgctccacgagcgctacctggcgcgcggctgtgcgcgccgggcgcggggccggtgggagggcagcgcgccccggcggctactgctggcgctgcaccggcggctccgcggcctgcggagggcggcggctggcacctcgcgtctgctcttccagcgcctgctgccctgcggcgtcatcaagttccgctacatctggatctgctggttcgcagcactggcggcagggggcgcctacatcgccggagtcagcccccgcctgcggctgcccacgctgccgccgcccggcggccaggtcttccggcccagccaccccttcgagcgcttcgacgcggagtatcgccagctgttcctgttcgagcagctgccgcagggcgagggcggccacatgcccgtggttttggtgtggggcgtcctgcctgtggacactggcgaccctctggaccctcgtagcaacagcagcctggtgagggaccctgccttctcggccagcggccctgaggcccagcgctggctgctggcactctgtcaccgggcccggaatcagagcttcttcgacaccctgcaggaaggctggcccacgctgtgtttcgtggagaccctccagcgctggatggagagccccagctgcgcccgcctggggcctgacctctgctgcggccactcggacttcccctgggccccccagtttttcctgcactgcctgaaaatgatggctctggagcaaggccccgatggcacccaggacctgggactccgctttgatgcccatggcagcctggccgccctggtcctacaattccagaccaacttccggaacagtccggactacaaccagacccagctcttctacaatgaggtcagccactggctggcagcggagctgggcatggcacctccaggcctccgccgtggttggttcactagccgtctagagctgtatagcctgcagcacagcctgagcactgagcctgctgtggtgctgggcctggctttggcgctggcctttgccacactgctcctgggcacctggaatgttcccctcagcctattctccgtggcagctgtggcaggcaccgtgctgctcactgtaggactcctggttctcctcgagtggcagctcaacactgccgaggccctgtttctctctgcctcagtgggcctctcagtagacttcactgtcaactactgcatctcctatcacctgtgcccacaccctgaccgcctgagccgtgtggccttctctctgcgccagaccagctgcgccacagccgtgggggctgcagccctgtttgcggcaggcgtgctcatgctgcctgccacagtgctgctctatcgcaagctgggcatcatcctcatgatggtcaaatgcgtcagttgtggctttgccagcttcttcttccaatctctctgctgtttcttcgggccagagaagaactgtgggcagatcctctggccctgtgcccacctgccatgggatgctggtactggggaccctggtggggagaaggcaggccgcccacgaccagggtcagtgggagggatgcccgggtcctgctcagagcaatatgagctacagcccctggcacggcgtcggagccccagctttgacaccagcacagccaccagcaagctgtcccaccggccctcagtactctctgaggatctgcagctccatgatggtccgtgctgttcccggcccccaccagcccctgcctccccaagggagctgctgctggaccaccaggcagtcttcagccagtgccctgccctgcagacctcctccccctataagcaggctggccccagccccaaaacccgggccaggcaggactcccaaggggaggaggctgagcccctgccagcctcaccagaagccccagcccactctcctaaggccaaggctgcagatcctcctgatggcttctgttcctcagccagcaccctggaggggctcagcgtctctgatgagacctgcctaagcacctctgagcccagtgcccgtgtaccagattccgtgggtgtgtccccagatgacctggatgacactgggcagccagtccttgagcgaggccagctcaatgggaagcgggacaccctgtggctggcgctgagggagacagtgtatgacccatcattgcccgcttcccatcacagcagcttgtcctggaagggccgaggggggccaggggatggcagccctgtggtgctgcccaatagccagccagacctgccagatgtttggctgcgcaggcccagcactcacacgtcaggctatagcagctga

SEQ ID NO: 7 - DNA, 504 bp, Homo sapiens
atggccaccgaggtccacaatctgcaggagctccggcgaagtgcctcactggccaccaaggtctttatccagagagactacagcgatgggaccatctgtcagttccagaccaaattccccccagagctggacagccggatcgagcggcagctctttgaagagactgtgaagaccctcaacggattttacgcagaggctgagaagattgggggcagctcctacctcgagggctgcctggcctgcgccacggcctacttcatcttcctctgcatggagacccactatgagaaggttctcaagaagatttcccgctacatccaggagcagaatgagaagatctttgcacctcgaggcctcctacttacagaccctgtggagcgtgggatgagggttattgagatctccatctacgaggaccggtgcagcagtggcagctccagcagcggcagcagcagcggcagtggcagcagcagcggtgggggtggtggggcgggggcccggtga

SEQ ID NO: 8 - DNA, 429 bp, Homo sapiens
atggtgctgtctcctgccgacaagaccaacgtcaaggccgcctggggtaaggtcggcgcgcacgctggcgagtatggtgcggaggccctggagaggatgttcctgtccttccccaccaccaagacctacttcccgcacttcgacctgagccacggctctgcccaggttaagggccacggcaagaaggtggccgacgcgctgaccaacgccgtggcgcacgtggacgacatgcccaacgcgctgtccgccctgagcgacctgcacgcgcacaagcttcgggtggacccggtcaacttcaagctcctaagccactgcctgctggtgaccctggccgcccacctccccgccgagttcacccctgcggtgcacgcctccctggacaagttcctggcttctgtgagcaccgtgctgacctccaaataccgttaa

SEQ ID NO: 9 - DNA, 429 bp, Homo sapiens; identical to SEQ ID NO: 8

SEQ ID NO: 10 - DNA, 2577 bp, Homo sapiens
atgccggcgggcatgacgaagcatggctcccgctccaccagctcgctgccgcccgagcccatggagatcgtgcgcagcaaggcgtgctctcggcgggtccgcctcaacgtcggggggctggcgcacgaggtactctggcgtaccctggaccgcctgccccgcacgcggctgggcaagctccgcgactgcaacacgcacgactcgctgctcgaggtgtgcgatgactacagcctcgacgacaacgagtacttctttgaccgccacccgggcgccttcacctccatcctcaacttctaccgcactgggcgactgcacatgatggaggagatgtgcgcgctcagcttcagccaagagctcgactactggggcatcgacgagatctacctggagtcctgctgccaggcccgctaccaccagaagaaagagcagatgaacgaggagctcaagcgtgaggccgagaccctacgggagcgggaaggcgaggagttcgataacacgtgctgcgcagagaagaggaaaaaactctgggacctactggagaagcccaattcctctgtggctgccaagatccttgccataatttccatcatgttcatcgtcctctccaccattgccctgtccctcaacacgctgcctgagctacagagcctcgatgagttcggccagtccacagacaacccccagctggcccacgtggaggccgtgtgcatcgcatggttcaccatggagtacctgctgaggttcctctcctcgcccaagaagtggaagttcttcaagggcccactcaatgccattgacttgttggccattctgccatactatgtcaccattttcctcaccgaatccaacaagagcgtgctgcaattccagaatgtccgccgcgtggtccagatcttccgcatcatgcgaattctccgcatccttaagcttgcacgccactccactggcctccagtctctgggcttcactttgcggaggagctacaatgagttgggcttgctcatcctcttccttgccatgggcattatgatcttctccagccttgtcttctttgctgagaaggatgaggacgacaccaagttcaaaagcatcccagcctctttctggtgggccaccatcaccatgactactgttgggtatggagacatctaccccaagactctcctggggaaaattgttgggggactctgctgcattgcaggagtcctggtgattgctcttcccatccccatcatcgtcaataacttctctgagttctataaggagcagaagagacaggagaaagcaatcaaacggcgagaggctctggagagagccaagaggaatggcagcatcgtatccatgaacatgaaggatgcttttgcccggagcattgagatgatggacattgtggttgagaaaaatggggagaatatgggtaagaaagacaaagtacaagataaccacttgtctcctaacaaatggaaatggacaaagaggacactgtctgaaaccagctcaagtaagtcctttgaaaccaaggaacagggatcccctgaaaaagccagatcgtcttctagtcctcagcacctgaacgttcagcagttggaagacatgtacaataagatggccaagacccaatcccaacccatcctcaataccaaggagtcagcagcacagagcaaaccaaaggaagaacttgaaatggagagtatccccagccccgtagcccctctgcccactcgcacagaaggggtcattgacatgcgaagtatgtcaagcattgatagtttcattagctgtgccacagacttccctgaggccaccagattctcccacagccctttgacatcactccccagcaagactgggggcagcacagccccagaagtgggctggcggggagctctgggtgccagtggtggtaggtttgtggaggccaaccccagccctgatgccagccagcactctagtttcttcatcgagagccccaagagttccatgaaaactaacaaccctttgaagctccgagcacttaaagtcaacttcatggagggtgaccccagtccactcctccccgttctagggatgtaccatgaccctctcaggaaccgggggagtgctgcggctgctgtcgctggactggagtgtgccacgcttttggacaaggctgtgctgagcccagagtcctccatctacaccacagcaagtgctaagacacccccccggtctcctgagaaacacacagcaatagcgttcaactttgaggcgggtgtccaccagtacattgacgcagacacagatgatgagggacagctgctctacagtgtggactccagcccccccaaaagcctccctgggagcaccagtccgaagttcagcacggggacaagatcggagaaaaaccactttgaaagctcccctttacccacctcccctaagttcttaaggcagaactgtatttactccacagaagcattgactggaaaaggccccagtggtcaggaaaagtgcaaacttgagaaccacatctcccctgacgtccgtgtgttgccagggggaggagcccatggaagcacacgagatcagagcatctga

SEQ ID NO: 11 - DNA, 2472 bp, Homo sapiens
atggcggatcgcgcggagatgttttctctctccaccttccactcgctgtcgccgccgggctgcaggcctccccaggacataagcctggaagaatttgacgacgaagatctgtctgagatcactgatgactgtggcctgggcctcagctacgactcagaccactgtgagaaggacagcctctccctggggcgctcggagcagccgcaccccatctgctccttccaggatgacttccaggagtttgagatgatcgatgacaatgaagaggaggacgatgaggacgaggaagaggaggaggaggaggaggagggagatggggaaggccaggagggaggagaccctggctcagaggcacctgcccccgggccccttatcccctccccttccgtggaggagccccacaagcaccggcccaccaccctccgtctgaccacactgggggcccaggactccctaaacaacaacggaggctttgacctggtgcgtccggcctcctggcaggagacagcgctatgctcacccgccccggaggccctcagagagctcccgggccccctccctgccacggacaccgggcccggcggggcgcagtcgccagtgcgcccgggttgcgactgcgaagggaaccggcctgcggaaccccctgcgccaggggggacttcgccctcctcagatcccggcatcgaggctgacctgagaagccgctcgagcggcggccgcgggggacgtcgcagcagccaggagctgtcctcgcccggctccgactcggaggacgcgggcggccgcctggggcgcatgatctcgtccatctcggagacggagctggagctgagcagcgatggcggaagcagcagcagcggccgctcctcgcacctcaccaactccatcgaggaggcctcgtcgcccgcctcggagccggagcccccgcgcgaacccccgcgccgccccgccttcctgcccgtgggccccgacgacaccaacagcgagtacgagtcggggtcggagtcggagccggacctcagcgaggacgcggactcgccctggctgctcagcaacctggtgagccgcatgatctccgagggctcctcgcccatccgctgccccggccagtgcctgtctcctgcgccgcgcccgcccggggagcccgtgtcgccggccggcggggccgcccaggactcccaggaccccgaggcggccgcggggcccggcggcgtggagctggtggacatggagacgctgtgcgcgccgccgccgcccgcgcccgccgcgcctcgacccggccccgcgcagcccgggccctgcctattcctcagcaaccccacgcgtgacaccatcacgccgctgtgggccgcgcccggccgcgccgcccgcccgggacgagcctgctccgccgcctgctccgaggaggaggacgaagaggacgacgaggaagaggaggatgccgaggacagtgcggggtcccccgggggcaggggcacgggcccctcggcgccgcgggacgcgtcgctggtgtacgacgcggtcaagtacacgctggtggtggatgagcacacgcagctggagctggtgagcctgcggcgctgtgctgggctgggccacgacagcgaagaggacagcggcggggaggccagcgaggaggaggcgggcgcggcgctgctaggcggcggtcaggtctcgggggacacctcgccggacagccctgacctcactttctccaagaagttcctcaatgtcttcgtcaacagcacatctcggtcctccagcaccgagtcctttggccttttctcctgtctggtcaacggcgaggagcgagagcagactcaccgggctgtgttcaggttcatcccgcggcatccagacgagctggagctggatgtggatgaccctgtgttggtggaggccgaggaggacgacttctggttccgtggcttcaacatgcgcacgggggagcgcggtgtgtttcctgccttctacgcccatgcggtgcccggccctgccaaggacctgctggggagtaagcggagcccctgctgggtggagcgctttgacgtgcagttcctgggctccgtggaggtgccctgccaccagggcaacggcatcctgtgtgcagccatgcagaagattgccactgcccggaaactgaccgtccacctgcgccctcctgcctcctgtgacctcgagatctctcttcggggggtcaagctgagtctgagcggaggagggcccgagttccagcgctgcagccatttcttccagatgaagaacatctccttctgcggctgccatccccgcaacagctgctatttcggcttcatcaccaaacaccccctgctgagccgcttcgcctgccacgtctttgtctcccaggagtccatgaggccggtggcgcagagtgtgggccgcgccttcctggagtactaccaagagcacctggcgtacgcctgccccacggaggacatctacctggagtag

SEQ ID NO: 12 - DNA, 1938 bp, Homo sapiens
atgccgaggagccggggcggccgcgccgcgccggggccgccgccgccgccgccgccgccgggccaggccccgcgctggagccgctggcgggtccctgggcggctgctgctgctgctgctgcccgcgctctgctgcctcccgggcgccgcgcgggcggcggcggcggcggcgggggcagggaaccgggcagcggtggcggtggcggtggcgcgggcggacgaggcggaggcgcccttcgccgggcagaactggttaaagtcctatggctatctgcttccctatgactcacgggcatctgcgctgcactcagcgaaggccttgcagtcggcagtctccactatgcagcagttttacgggatcccggtcaccggtgtgttggatcagacaacgatcgagtggatgaagaaaccccgatgtggtgtccctgatcacccccacttaagccgtaggcggagaaacaagcgctatgccctgactggacagaagtggaggcaaaaacacatcacctacagcattcacaactataccccaaaagtgggtgagctagacacgcggaaagctattcgccaggctttcgatgtgtggcagaaggtgaccccactgacctttgaagaggtgccataccatgagatcaaaagtgaccggaaggaggcagacatcatgatcttttttgcttctggtttccatggcgacagctccccatttgatggagaagggggattcctggcccatgcctacttccctggcccagggattggaggagacacccactttgactccgatgagccatggacgctaggaaatgccaaccatgacgggaacgacctcttcctggtggctgtgcatgagctgggccacgcgctgggactggagcactccagcgaccccagcgccatcatggcgcccttctaccagtacatggagacgcacaacttcaagctgccccaggacgatctccagggcatccagaagatctatggacccccagccgagcctctggagcccacaaggccactccctacactccccgtccgcaggatccactcaccatcggagaggaaacacgagcgccagcccaggccccctcggccgcccctcggggaccggccatccacaccaggcaccaaacccaacatctgtgacggcaacttcaacacagtggccctcttccggggcgagatgtttgtctttaaggatcgctggttctggcgtctgcgcaataaccgagtgcaggagggctaccccatgcagatcgagcagttctggaagggcctgcctgcccgcatcgacgcagcctatgaaagggccgatgggagatttgtcttcttcaaaggtgacaagtattgggtgtttaaggaggtgacggtggagcctgggtacccccacagcctgggggagctgggcagctgtttgccccgtgaaggcattgacacagctctgcgctgggaacctgtgggcaagacctactttttcaaaggcgagcggtactggcgctacagcgaggagcggcgggccacggaccctggctaccctaagcccatcaccgtgtggaagggcatcccacaggctccccaaggagccttcatcagcaaggaaggatattacacctatttctacaagggccgggactactggaagtttgacaaccagaaactgagcgtggagccaggctacccgcgcaacatcctgcgtgactggatgggctgcaaccagaaggaggtggagcggcggaaggagcggcggctgccccaggacgacgtggacatcatggtgaccatcaacgatgtgccgggctccgtgaacgccgtggccgtggtcatcccctgcatcctgtccctctgcatcctggtgctggtctacaccatcttccagttcaagaacaagacaggccctcagcctgtcacctactataagcggccagtccaggaatgggtgtga

SEQ ID NO: 13 - DNA, 1665 bp, Homo sapiens
atgcctgactacagaactcgagctctcttcgtgcaaagtactctcggggactctgcaggacctgagctgcagttgctcagcatagtgcccggccgggatctgcagccaagcgattcattcacagcctcctcctcaccaccaccatctgtgtggtcagaacttgagcacatccgtggaaaatcagaagcaaccacagagctaaaaagacccagccttccagggagtattcattcctgcctatgtggggtgtggtgtggcgtggggaagagaacccccagctccttggtgtccagcttgcaggaccttgagctccttggccagaggcagcgacagctgtggatggagtcgacgcctcggccgccctataatccattcctcgtgccctgcacacccgtggggaaactcagtgcagagcatggaggtcccacccgaaagatgccccccagcgccagtgccgtggacttcttccagctctttgtcccagacaacgtcctcaagaacatggtggtgcagacaaacatgtatgccaagaagttccaggagcggtttgggagcgacggagcctgggtggaggtgacgctgacggagatgaaggcgttcctgggctacatgatctccaccagcatctcccactgcgagtccgtcctcagcatctggagcggaggcttctacagcaaccgcagcctcgccctcgtcatgagccaggcccgcttcgagaagatcctcaagtacttccacgtcgtggccttccgctccagccagaccacgcacgggctctacaaggtccagcccttcctcgactccctgcagaacagcttcgactctgccttcaggccttcccaaacccaggtgctacatgaacccctgatcgatgaggatcctgtattcattgccacgtgcacagagcgggagctgcgaaagaggaaaaagcggaaattcagcctctgggtcagacaatgttcttccactggcttcatcatccagatttatgtccacctgaaggaaggtgggggcccagatggcctggatgcgctgaagaataagccccagctccacagcatggtggccaggagcctgtgccggaacgcggcaggcaagaactacatcattttcacggggcccagcatcaccagcctgacgctgtttgaagagtttgagaagcaagggatttactgctgcggcttgctccgcgcgcggaagagtgactgcaccggcctcccactgtccatgctgaccaacccagccacacccccggcccggggccagtaccaaatcaagatgaaggggaacatgtccttgatctgctggtacaacaaaggacacttccgcttcctgaccaacgcctactccccggtgcagcagggagtcatcatcaaaaggaagagtggggagatcccatgccccttggccgtggaggcgtttgccgctcacctgagctacatctgcagatacgatgacaaatacagcaagtatttcatttctcataaaccaaacaagacctggcagcaggtgttctggttcgccatcagcatcgccatcaacaatgcctacatcctgtacaaaatgtcagacgcctaccacgtgaagaggtacagccgggcgcagtttggagagagactcgtcagagagctgctgggcttggaggatgcctctccgacccactga

SEQ ID NO: 14 - DNA, 4308 bp, Homo sapiens
atggcccagacccccgacggcatctcctgtgagctccgaggcgagatcaccaggttcctgtggcccaaagaggtggagctgctgctgaaaacctggctacccggggagggtgctgtgcaaaaccatgtcctggcactgctacgatggagagcctacctgctgcacaccacctgcctcccgctgagggtggactgcacgttcagctacctggaggtccaggccatggcgctgcaggagacaccccctcaggtcacctttgagctggagtccctgcgtgagctggtcctggagtttcctggtgtggccgccctggaacagctggcccagcacgtggctgcagccatcaagaaggtcttccctcgctcgacccttgggaagctattccggaggcccacaccagcctccatgctggctcggctggagagaagcagcccctcggagtccactgacccctgcagcccctgtggtggcttcttggagacatacgaggctctgtgtgactacaatggcttccctttccgagaggagattcagtgggacgtggacaccatttaccatcgccagggctgccgccatttcagcctgggagacttcagccacctcggcagtcgggacctggccttgagtgtggctgccctgtcctacaacctgtggttccggtgcctctcctgtgtggacatgaagctgagccttgaggtctcagaacagattctgcacatgatgagtcagtcatcacacctggaggagctggtgctggagacctgcagcctgaggggagactttgtccgacgactggcccaggcgctggcgggacactcaagctctgggctgcgggagctcagcctcgcggggaacctgctggatgaccgaggcatgactgcactcagcagacacctcgagcgttgtccaggagccctgaggagactcagcctggcccagacagggttgacaccgcgaggaatgagggctctgggccgggcactggccaccaatgccgccttcgactccaccctgacccacctggacctttctgggaatcctggggcgctgggggcctccgaggacagtgggggcctctatagcttcctgagccgtcctaacgtactgtcgttcctgaatctcgcaggcaccgacactgccctggacactgtgagggggtgctccgtggggggatggatgaccggcagggcggactggagggcgggacggggagggctcggtccccccgcgggtgtagccaacagcctccccccgcagctcttcgcagcggtatcccgaggctgctgcaccagccttacccacctcgacgcttcgaggaacgtcttctcccgcacgaagtcccgcgccgcgccggccgcgctgcagctcttcctcagccgcgcgcggacgctgcggcacctgggcctggcgggctgcaagctgccgcccgacgcgctcagagcccttttggatggcctcgcgctcaacacgcacctccgcgacctgcacctggacctcagcgcttgcgagctgcgctcggccggcgcccaggtgatacaagacttagtgtgcgacgcaggcgctgtgagctccctggatctggcggataacggcttcggctcagacatggtgactctggtgctggccatcgggagaagccggtccctgagacatgtggcgcttggaaggaacttcaacgtccggtgcaaggagaccctggacgacgtcctgcaccggattgtccagctcatgcaggacgacgattgtcctcttcagtctctgtcggtggctgagtctcggctgaagctgggtgccagcgtcctactccgggccctagccaccaatcctaacctgaccgcgctggatatcagcggcaacgccatgggggacgcgggcgccaagttgctggccaaggcgctgcgggtcaactcgaggctccggtctgtggtctgggaccggaaccacacatctgctttgggtctgctggacgtggcgcaggcgctggagcagaaccacagcctgaaggccatgcctctgccactgaacgacgtggcccaggcgcagcgcagccgcccggaactgacagcacgtgcagtccatcagatccaagcctgtctcttgaggaacaaccgcgcagaccctgcctcttctgaccacacgacccgccttcagccacttggtctggtctcagacccctcagagcaggaagtgaatgaattgtgtcagtcggtgcaggagcatgtggagctgctgggctgtggggctgggccccagggtgaagccgctgtgcgccaggccgaggatgccatccaaaatgccaacttctctctcagcattctccccattctatatgaagctggaagctccccaagccatcactggcagcttgggcagaagctggagggccttctgagacaggtgggcgaggtctgccgccaggacatccaggacttcactcaggccacactggacacagcaaggagcctctgcccacagatgctgcagggatccagctggagggagcagctagagggggtcctggcaggctcgaggggcctcccggagctgctcccagagcagctgctgcaagatgccttcactaggctcagggacatgcggctatcaatcacggggaccttggcagagagcattgtggctcaggctttggcaggcctgagtgcagcccgggatcagctggtggagagtctggctcagcaggcaacagtgacaatgccccctgccctaccagcaccggatggaggtgagcccagcctccttgagcctggggaattggaaggtcttttcttccccgaggagaaggaagaggagaaggagaaggatgacagtcctccacagaaatggcctgagctcagccacggtcttcacctggtccccttcattcacagtgctgctgaggaagcggagccggagcccgagctggcggctccgggagaagatgcagagccgcaggcggggccgtccgcgcgcggctctccgagccctgccgcccctgggcccccggccggcccgctgccccgcatggacctgccactggcggggcagcccctgcgccatccgacccgggcccggccgcggccgcgccgccagcaccaccaccgcccgccgccggggggcccccaggtacccccagccttgccgcaggaagggaatgggctcagtgcccgcgtggacgagggcgtggaggaattcttctccaaaaggctgatccagcaggatcgcctctgggcccccgaggaggacccggccactgaggggggcgccactcctgtcccccgtacactgcgaaagaagctgggcaccctctttgccttcaagaagcctcgttcaacgcggggtccacggactgatctagagaccagccctggggcagctccccgaacccgaaaaactacatttggcgacctactgcggccgccaacccgtcccagccgtggtgaggagcttggtggggctgagggggacaccagcagccctgaccctgccggcaggagccgacctcgctacacaagagatagcaaggcctactcgatgatactgctgcctgccgaggaggaggcaacgctgggtgccagacccgacaagcggcggcccctggagcggggagaaacagaactggctccatcctttgaacagcgggtacaagtaatgctgcagaggataggcgtcagccgaggcagcgggggtgccgaaggcaagaggaagcaaagcaaagatggcgagatcaagaaagctggctcagatggtgacattatggacagttccacggaggcccctcccatctcgatcaagtcccgcacccactctgtgtctgctgacccttcctgcagacctggcccagggagccaggggcctgagtctgccacctggaagacactggggcagcagttgaatgcggagctcaggagccgtggttggggccaacaggatggtccaggccctccctcccctggtcaaagcccaagtccctgcagaaccagcccctccccagacagcctgggcctcccagaggacccttgcttgggccccagaaatgaagatggccagctgaggccgaggcctctctcggcagggcggcgagcagtgtctgtgcatgaggaccagctccaggcccctgctgaacggcccctgaggctgcagcgctcccccgtcctcaaacgcaggccaaaactcgaggcacctccatccccaagcctaggatctggccttggaaccgagcctctgcccccacagcccacagagccctccagccctgagcggagcccaccctccccagccacagaccaaagaggcggcggccccaatccctga

SEQ ID NO: 15 - DNA, 1638 bp, Homo sapiens
atggggcaggtcctgccggtcttcgcccactgcaaagaagctccgtctacagcctcctcaactcctgattccacagaaggagggaacgacgactctgattttcgagagctgcacacagcccgggaattctcagaggaggacgaggaggagaccacgtcgcaggactggggcaccccccgggagctgaccttctcctacatcgcctttgatggtgtagtgggctccgggggccgcagggattcaactgcccgccgcccccgcccccagggccgctcagtctcggaaccacgagaccagcaccctcagcccagcctgggcgacagcttggagagcatccccagcctgagccaatccccggagcctggacgacggggtgatcctgacaccgcgcctccatccgagcgccctctggaagacctgaggcttcggttggaccatctgggctgggtggcccggggaacgggatccggggaggactcttccaccagcagctccaccccgctggaagacgaagaaccccaagaacccaacagattggagacaggagaagctggggaagaactggacctacgactccgacttgctcagccctcatcgcccgaggtcttgactccccagctcagtccgggctctgggacaccccaggccggtactccgtccccatcccgatcgcgagattcgaactctgggcccgaagagccattgctggaagaggaagaaaagcagtgggggccactggagcgagagccagtaaggggacagtgcctcgatagcacggaccaattagaattcacggtggagccacgccttctaggaacagctatggaatggttaaagacatcattgcttttggctgtttacaagacggttccaattttggaattgtccccacctctgtggacagccattggctgggtccaaaggggccccaccccccctactcctgtcctccgggttctactgaagtgggcaaaatccccgagaagcagcggtgtccccagcctctcactcggagccgatatggggagtaaagtggcggacctgctgtactggaaggacacgaggacgtcaggagtggtcttcacaggcctgatggtctccctcctctgcctcctgcactttagcatcgtgtccgtggccgcgcacttggctctgttgctgctctgcggcaccatctctctcagggtttaccgcaaagtgctgcaggccgtgcaccggggggatggagccaaccctttccaggcctacctggatgtggacctcaccctgactcgggagcagacggaacgtttgtcccaccagatcacctcccgcgtggtctcggcggccacgcagctgcggcacttcttcctggtagaagacctcgtggattccctcaagctggccctcctcttctacatcttgaccttcgtgggtgccatcttcaatggtttgactcttctcattctgggagtgattggtctattcaccatccccctgctgtaccggcagcaccaggctcagatcgaccaatatgtggggttggtgaccaatcagttgagccacatcaaagctaagatccgagctaaaatcccagggaccggagccctggcctctgcagcagccgcagtctccggatccaaagccaaagccgaatga

SEQ ID NO: 16 - DNA, 2047 bp, Homo sapiens
actggccgaggggggcgggcggctggaggagggggtgacggggccccggctcagcacctcggagagctccctccccggccttgttttgctctggcatcgccgccgggggagggagcgagggggccgggcaccgggcgcaaaggcagggggatggccatggaagggttgaggggccccgtcggacagagggcccagccgtgatccagcgacgggtttggggctccgggaggggtgggggggcagcgggcggcggcagcagtggccgcacatctggatggaagcgagctttgtccagaccaccatggctctggggctgtcctccaagaaagcgtcctctcgcaacgtggctgtggagcgtaagaacctgatcaccgtgtgcaggttctctgtgaaaacgctgctggagaagtacacagcggagcccatcgatgactcatcggaggagtttgtcaattttgcagccattttagagcagatcctcagccaccgcttcaaagcctgtgccccagcaggtccagtgagctggttcagctcagacgggcagcggggcttttgggactatatccggctggcctgcagcaaagtgcccaacaactgtgtgagcagcatcgagaacatggagaacatcagcacagcccgggccaagggccgggcatggatccgggtggcactgatggagaagcgcatgtcagaatacatcaccacggctctgcgtgacacccggaccaccagacggttctatgactctggagccatcatgctgcgggatgaagccaccatcctcaccggaatgctgatcggactgagcgccatcgacttcagcttctgtctaaagggggaagtcctggacgggaagacccccgtggtcatcgattacacgccctacctaaagttcacgcagagctacgactacctgacggacgaggaggagcggcacagcgccgagagcagcacgagcgaggacaactcgcccgagcacccgtacctcccgctcgtcaccgatgaggacagctggtacagcaagtggcacaagatggagcagaagttccgcatcgtctacgcgcagaagggctacctggaggagctggtgcgtctgcgcgagtcgcagctgaaggacctggaggcggagaaccggcggcttcagctgcagctggaggaggcggcggcgcagaaccagcgcgagaaacgggagctggaaggcgtgatcctggagctgcaggagcagctgacaggtctgatccccagtgaccacgcccctctggcccagggttccaaggagctcactacacccctggtcaatcaatggccctcactgggaacgcttaatggggccgagggcgccagcaactccaagctctaccggagacacagcttcatgagcacggagccgctgtcagctgaagccagtctgagctcggactcccagcgcctgggagagggcacgcgggacgaggagccctggggtcccatcgggaaggaccccacgccctccatgctgggcctctgcggctccctggcctccattcccagctgcaagtccctggcgagcttcaaatccaacgagtgcctggtgagcgacagtcccgagggcagcccagcactgagccccagctgaggaacagcatgggcagtgccagccccacctgccaggggccatggacacctgccacctttcttcaacaagagtcccccaatccaggctacccttccagagaacgctacccacccagccagggttctctcggggaagatctcgtctgctcaccttagctttctgccttggcagcacgggctgcggaagaaagcacgctgggccaggaggcaggggtgcccaagccacagggagcccctggggaagcctgctccattcttctggtgaccttggcgctccttcactcatctcccctgccccctcaggaactggtggcccagcttccacacccccacctcccagtctctagcctctccatctgtctgtgtatggcctggagtcactccttcctcagcccccagggcaagagagctcaaataaaaaccagaggactga

SEQ ID NO: 17 - DNA, 3408 bp, Homo sapiens
gctccccgcccccagccccggagcggctcgcggccggctccgcgccgcatcgctcgggtgcagcgcagctcagcgcagcgctgcggcctttcggcagccgaacggccgcggcagttcaggacaaagaggtgtgggcaggccactgggccagctggtaacatcatggcagagaaagtgaacaacttcccaccattgcccaaattcatcccgctgaagccatgtttctaccaagacttcgaggcagatattcctccccagcatgtcagcatgaccaagcgcctctactacctctggatgttgaacagcgtcacgctggccgtgaacctggtgggctgtctcgcgtggctgatcggaggcgggggagccaccaactttggcctcgcctttctctggctcatcctcttcacaccctgctcctacgtctgctggtttcggcccatttacaaggccttcaagactgacagctccttcagtttcatggcattcttctttaccttcatggctcagttggtcatcagcatcatccaggccgtgggcatcccaggctggggcgtctgcggctggattgctaccatctccttcttcggaacgaacattggctcggcggtggtgatgctaattcccactgtcatgttcacagtgatggccgtcttttccttcatcgccctcagcatggttcataaattttaccggggaagtggggggagtttcagcaaagctcaggaggagtggaccacaggggcctggaagaatccacatgtgcagcaggcagcccagaacgcagccatgggggcagcccagggtgccatgaatcagcctcagactcagtattccgccacccccaattacacgtactccaatgagatgtgaaccagccacgcctaccaggtggcagagctggggccattgggacagggggctcaagccacatcgtcatttgtggttaccaagcagggttcccccttcccttttctccttccctactttgtacaaaggaccagagttatatatatatatatatgtatatgtctgtaccccagcccccacctttcagattctgctcttggcactcagctgtgggctgcacgtggagctgtcccgtgcggtagtagctgtgtctgtgtcccctcgtgaaatagtgtgcagtggaggtctcttgtggtgctagatgtgtgtttagagctaaaccagcccccacccccaccctccacctgcccctcttgcctctggcccctctgaccctggcccagggacccctcacggggccaggggaggcatagcagaaagactggccccttcctagggttatgagctggaactgtttctactttcagtcttcctgggaagtaacagtacttagcactcttggtggtgggtgggagggtgggtacaggccagggatattcccttgctcttttgatccctccaggcctcgcctccttcagcctcctcctccctcatctgttccctgatgtcacattccctgtgcaatcttcccttgcccatggtctgtctatctctttcctatgtggcttttctttgtcttccccaaggctgagtgtcccagttttatctgctcctgagactgagcccagatccccaaatctaatctgatttacagttcaaggaagctgatggggagctgggccttacccctgatgtaggaggggcacacagctgggggtgcagagcccacctgggtacctgacccccaggggatgaaaatgcaaggatgagtctgcttgggcctgagagtttgatctgcaggggcaggctcatcttttctctcccctgccttctcctccttctctccccagagcccccttgagcccctctgcctatgtccctctgcctcctccccatgcccccagttgctgtggcttgattctgctaccctgaccccaccatgtgccaggtggcatctgccttactgccttccctgaggagctgggacatgctgggcagttgtcagatgtaaaggcacagctggagcagagggcatgtcagtaatgattggtccctggggaaggtctggctggctccagcacagtgaggcatttaggtatctctcggtgaccgttggattcctggaagcagtagctgttctgtttggatctggtaggacagggctcagagggctaggcacggagggaaggtcagaggagaaggcaggcagggcccagtgagaggggagcatgccttcccccaccctggcttgctcttggtcacagggcggttctgggcacttgaactcagggcccaagcagaagcacaggcccagtcctggctgcaagcacaatagcctgaatgggatttcaggttaggcagggtgggaggggaggctctctggctttagttttgttttgttttccaaatcaaggtaacttgctcccttctgcctacaggccttggtcttggcttgtcctcacccagtcggaactccctaccactttcaggagagtggttttaggcccgtggggctgttctgttccaagcagtgtgagaacatggctggtagaggctctagctgtgtgcggggcctgaaggggagtgggttctcgcccaaagagcatctgcccatttcccaccttcccttctcccaccagaagcttgcctgagctgtttggacaaaaatccaaaccccacttggctactctggcctggcttcagcttggaacccaatacctaggcttacaggccatcctgagccaggggcctctggaaattctcttcctgatggtcctttaggtttgggcacaaaatataattgcctctcccctctcccattttctctcttgggagcaatggtcacagtccctggtacctgaaaaggtacctaggtctaggcccttcttccctttcccttcctctcccctaccccagaactttggctccctttcccttctctctctggtagctccaggaggcctgtgatccagctccctgcctagcatccatgacctgttggatgttacctccaatcagtttcctgtcctacctgcctctttggcttggacctatatggccatgctctggctctacccttgggaagcctgatcccggtgtgtggcccagcttgttcaggccctgggatgctgcatctccaggcaactatgcactttcccggggagagaaccagtatgagaagtgggggcagggcacacattcatctttgtaggaaggtctggcctggggtcgggtgaaggagggcccaggtcagttctggggtcccagtgacctgctttgccattctcctggtgccgctgctgctccctgtttctggagctggatgttccccagctggcagttgagctgcctgagccaatgtgtctgtctttggtaactgagtgaaccataataaaggggaacatttggccctgtgaaaaaaaaaaaaaaaaaaaaaaaaaa

SEQ ID NO: 18 - DNA, 273 bp, Homo sapiens
atgaagctgtcggtgtgtctcctgctggtcacgctggccctctgctgctaccaggccaatgccgagttctgcccagctcttgtttctgagctgttagacttcttcttcattagtgaacctctgttcaagttaagtcttgccaaatttgatgcccctccggaagctgttgcagccaagttaggagtgaagagatgcacggatcagatgtcccttcagaaacgaagcctcattgcggaagtcctggtgaaaatattgaagaaatgtagtgtgtga

SEQ ID NO: 19 - DNA, 2053 bp, Homo sapiens
catctttgatgagggcagagctcacgttgcattgaagacgaaacctcggggaggtcaggcgctgtctttccttccctccctgctcggcggctccaccacagttgcaacctgcagaggcccggagaacacaaccctcccgagaagcccaggtccagagccaaacccgtcactgaccccccagcccaggcgcccagccactccccaccgctaccatggccgaagacgcagacatgcgcaatgagctggaggagatgcagcgaagggctgaccagttggctgatgagtcgctggaaagcacccgtcgtatgctgcaactggttgaagagagtaaagatgctggtatcaggactttggttatgttggatgaacaaggagaacaactcgatcgtgtcgaagaaggcatgaaccatatcaaccaagacatgaaggaggctgagaaaaatttaaaagatttagggaaatgctgtggccttttcatatgtccttgtaacaagcttaaatcaagtgatgcttacaaaaaagcctggggcaataatcaggacggagtggtggccagccagcctgctcgtgtagtggacgaacgggagcagatggccatcagtggcggcttcatccgcagggtaacaaatgatgcccgagaaaatgaaatggatgaaaacctagagcaggtgagcggcatcatcgggaacctccgtcacatggccctggatatgggcaatgagatcgatacacagaatcgccagatcgacaggatcatggagaaggctgattccaacaaaaccagaattgatgaggccaaccaacgtgcaacaaagatgctgggaagtggttaagtgtgcccacccgtgttctcctccaaatgctgtcgggcaagatagctccttcatgcttttctcatggtattatctagtaggtctgcacacataacacacatcagtccacccccattgtgaatgttgtcctgtgtcatctgtcagcttcccaacaatactttgtgtcttttgttctctcttggtctctttctttccaaaggttgtacatagtggtcatttggtggctctaactccttgatgtcttgagtttcatttttcattttctctcctcggtggcatttgctgaataacaacaatttaggaatgctcaatgtgctgttgattctttcaatccacagtattgttcttgtaaaactgtgacattccacagagttactgccacggtcctttgagtgtcaggctctgaatctctcaaaatgtgccgtctttggttcctcatggctgttatctgtctttatgatttcatgattagacaatgtggaattacataacaggcattgcactaaaagtgatgtgatttatgcatttatgcatgagaactaaatagatttttagattcctacttaaacaaaaactttccatgacagtagcatactgatgagacaacacacacacacacaaaacaacagcaacaacaacagaacaacaacaaagcatgctcagtattgagacactgtcaagattaagttataccagcaaaagtgcagtagtgtcacttttttcctgtcaatatatagagacttctaaatcataatcatccttttttaaaaaaaagaattttaaaaaagatggatttgacacactcaccatttaatcatttccagcaaaatatatgtttggctgaaattatgtcaaatggatgtaatatagggtttgtttgctgcttttgatggctacgttttggagagagcaatcttgctgtgaaacagtgtggatgtaaattttataaggctgactcttactaaccaccatttcccctgtggtttgttatcagtacaattctttgttgcttaatctagagctatgcacaccaaattgctgagatgtttagtagctgataaagaaaccttttaaaaaaataatataaatgaatgaaatataaactgtgagataaatatcattatagcatgtaatattaaattcctcctgtctcctctgtcagtttgtgaagtgattgacattttgtagctagtttaaaattattaaaaattatagactcc

SEQ ID NO: 20 - DNA, 543 bp, Homo sapiens
atggccagcaccatttccgcctacaaggagaagatgaaggagctgtcggtgctgtcgctcatctgctcctgcttctacacacagccgcaccccaataccgtctaccagtacggggacatggaggtgaagcagctggacaagcgggcctcaggccagagcttcgaggtcatcctcaagtccccttctgacctgtccccagagagccctatgctctcctccccacccaagaagaaggacacctccctggaggagctgcaaaagcggctggaggcagccgaggagcggaggaagacgcaggaggcgcaggtgctgaagcagctggcggagcggcgcgagcacgagcgcgaggtgctgcacaaggcgctggaggagaataacaacttcagccgccaggcggaggagaagctcaactacaagatggagctcagcaaggagatccgcgaggcacacctggccgcactgcgcgagcggctgcgcgagaaggagctgcacgcggccgaggtgcgcaggaacaaggagcagcgagaagagatgtcgggctaa

SEQ ID NO: 21 - DNA, 942 bp, Homo sapiens
atgctgctgctggcggacatggacgtggtgaatcagctggtggctgggggtcagttccgggtggtcaaggagcccctcggctttgtgaaggtgctgcaatgggtcttcgccatcttcgcctttgccacatgcggcagctacagtggggagctccagctgagcgtggattgtgccaacaagaccgagagtgacctcagcatcgaggtcgagttcgagtaccccttcaggctgcaccaagtgtactttgatgcacccacctgccgagggggcaccaccaaggtcttcttagttggggactactcctcgtcagccgaattctttgtcaccgtggccgtgtttgccttcctctactccatgggggctctggccacctacatcttcctgcagaacaagtaccgagagaataacaaagggcccatgctggactttctggccacggctgtgttcgccttcatgtggctagttagctcatcggcatgggccaaggggctgtcagatgtgaagatggccacagacccagagaacattatcaaggagatgcctgtctgccgccagacagggaacacatgcaaggagctgagagaccctgtgacctcgggactcaacacctcggtggtgttcggcttcctgaacctggtgctctgggtcggcaacctgtggttcgtgtttaaggagacaggctgggccgccccgttcctgcgcgcgcctcccggcgcccccgagaaacaaccggcacccggggacgcctacggcgatgcaggctacgggcagggccccggcgggtacgggccccaggattcctacgggcctcagggcggctaccagcctgactatggtcaaccagccggcagcggtggcagtggctacgggcctcagggcgactatgggcagcaaggctacggcccgcagggtgcacccacctccttctccaatcagatgtag

SEQ ID NO: 22 - DNA, 1692 bp, Homo sapiens
atggagcccctgcgcgcgcccgcgctgcgccgcctgctgccgccgctgctgctcctgctgctgtcactgcccccccgcgcccgggccaagtacgtgcggggcaacctcagttccaaggaggactgggtgttcctgacaagattttgtttcctctcggattacggccgactggacttccgtttccgctaccctgaggccaagtgctgtcagaacatcctcctctattttgatgacccatcccagtggccagccgtgtacaaggcaggggacaaggactgcctggccaaggagtcagtgatccggccggagaacaaccaggtcatcaacctcaccacccagtatgcctggtccggctgtcaggtggtatcagaggagggaacccgctacctgagctgctccagtggccgcagcttccgctcagtgcgtgaacggtggtggtatattgcgctcagcaagtgtgggggtgatggattgcagctggagtatgagatggtcctcaccaatggcaagtccttctggacacgacacttctccgctgatgagtttgggatcctggagacagatgtgaccttcctcctcatcttcatcctcatcttcttcctctcttgttactttggatatttgctgaaaggtcgtcagttgctccacacaacttataaaatgttcatggccgcagcaggagtagaggtcctgagcctcctatttttctgcatctactggggtcaatatgccaccgatggcattggcaacgagagtgtgaagatcttggccaagctgctcttctcctccagcttcctcatcttcctgctgatgcttatcctcctggggaagggattcacggtgacacggggccgcatcagccacgcgggctccgtgaagttgtctgtctacatgaccctgtacacgctcacccatgtggtgctgctcatctacgaggcggaattctttgacccaggccaggtactgtacacgtatgagtcgccggccggctacgggctcattggactgcaggtggcggcctacgtgtggttctgctatgctgtgcttgtctcactgcgacactttcctgagaagcagcctttttatgtgcccttctttgctgcctataccctctggttctttgcggttcctgtcatggccctgattgccaatttcggcatccccaagtgggcccgggagaagattgtcaatggcatccagctggggatccacttgtacgcccatggcgtgtttctgatcatgacccgcccatcagcggccaacaagaacttcccgtaccacgtgcgcacgtcgcagatcgcttcagccggagtccctggacccggagggagccaatccgctgacaaggccttcccgcagcacgtctatgggaacgtgacgtttatcagcgactcggtgcccaacttcacggagctcttctccatccccccgcccgccacctccgccgggaagcaggtggaggagacagcggtggcggcggcggtggccccgaggggccgcgtggtgaccatggccgagccgggcgcagcctcccccccacttcccgctcggttccccaaggcggccgactcgggctgggacggcccgacgccgccctaccagccgctcgtgccccagacggcagcgccgcacaccggcttcaccgaatacttcagcatgcacacggccgggggcactgcacccccggtctga

SEQ ID NO: 23 - DNA, 1083 bp, Homo sapiens
atgccggggactgtggcaacactgcggttccagctgctgccccctgagccagatgatgccttctggggtgcaccttgtgaacagcccctggagcgcaggtaccaggcactgccggccctcgtctgcatcatgtgctgtttgtttggagtcgtctactgcttcttcggttaccgctgcttcaaggcagtgctctttctcactgggttgctgtttggctcggtggtcatcttcctcctctgctaccgagagcgggtgctagagacacagctgagtgctggggcgagcgcgggcatcgctctgggcatcgggctgctctgcgggctggtggccatgctagtgcgcagcgtgggcctcttcctggtggggctgctgctcggcctgctgctcgcagctgctgccctgctgggctccgcaccctactaccagccaggctccgtgtggggtccactggggctgttgctggggggcggcctgctctgtgccctgctcactctgcgctggccccgcccactcaccaccctggccaccgccgtgactggtgctgcgctgatcgccactgccgctgactacttcgccgagctgctactgctggggcgctacgtggtggagcgactccgggctgctcctgtgcccccactctgctggcgaagctgggccctgctggcactctggcccctgctcagcctgatgggcgttctggtgcagtggagggtgacagctgagggggactcccacacggaagtggtcatcagccggcagcgccgacgcgtgcaactgatgcggattcggcagcaggaagatcgcaaggagaaaaggcggaaaaagagacctcctcgggctcccctcagaggtccccgggctcctcccaggcctgggccaccagaccctgcttatcggcgcaggccagtgcccatcaaacgcttcaatggagacgtcctctccccgagctatatccagagcttccgagaccggcagaccgggagctccctgagctccttcatggcctcacccacagatgcggactatgagtatgggtcccggggacctctgacagcctgctcaggccccccagtgcgggtatag

SEQ ID NO: 24 - DNA, 1848 bp, Homo sapiens
atgaaagccctcagattgtcggcttccgccctcttctgccttctgctgatcaacgggttaggggcagcaccccctggtcgccctgaggcgcagcctcctcctctcagctctgagcataaagagccggtagccggggacgcagtgcccgggccaaaggatggcagcgccccagaggtccgaggcgctcggaattccgagccgcaggacgagggagagcttttccagggcgtggatccccgggcgctggccgcggtgctgctgcaggcactcgaccgtcccgcctcacccccggcaccaagcggctcccagcaggggccggaggaagaagcagctgaagctctgctgaccgagaccgtgcgcagccagacccacagcctcccggcgccggagagcccggagcccgcggctccgcctcgccctcagactccggagaatgggcccgaggcgagcgatccctccgaggagctcgaggcgctagcgtccctgctccaggaactgcgagatttcagtccaagtagcgccaagcgccagcaggagacggcggcagcagagacggaaacccgcacgcacacgctgacccgagtgaatctggagagcccggggccagagcgcgtatggcgcgcttcctggggagagttccaggcgcgtgtcccggagcgcgcgcccctgccgcccccggccccctctcaattccaggcgcgtatgcccgacagcgggccccttcccgaaacccacaagttcggggaaggagtgtcctcccccaaaacacacctaggcgaggcattggcacccctgtccaaggcgtaccaaggcgtggccgccccgttccccaaggcgcgccggccggagagcgcactcctgggcggctccgaggcgggcgagcgccttctccagcaagggctggcgcaggtggaggccgggcggcggcaggcggaggccacgcggcaggccgcggcgcaggaagagcggctggccgacctcgcctcggacctgctgctccagtatttgctgcagggcggggcccggcagcgcggcctcgggggtcgggggctgcaggaggcggcggaggagcgagagagtgcaagggaggaggaggaggcggagcaggagagacgcggcggggaggagagggtgggggaagaggatgaggaggcggccgaggcggaggcagaggcggaggaggcggagagggcgcggcagaacgcgctcctgttcgcggaggaggaggacggggaagccggcgccgaggacaagcgctcccaggaggagacgccgggccaccggcggaaggaggccgaggggacagaggagggcggggaggaggaggacgacgaggagatggatccgcagacgatcgacagcctcattgagctgtccaccaaactccacctgccagcggacgacgtggtcagcatcatcgaggaggtggaggagaagcggaagcggaagaagaacgcccctcccgagcccgtgccgcccccccgtgccgcccccgcccccacccacgtccgctccccgcagcccccgccccccgcccccgctcccgcacgagacgagctgccggactggaacgaggtgctcccgccctgggatcgggaggaggacgaggtgtacccgccagggccgtaccaccctttccccaactacatccggccgcggacactgcagccgccctcggccttgcgccgccgccactaccaccacgccttgccgccttcgcgccactatcccggccgggaggcccaggcgcggcgcgcgcaggaggaggcggaggcggaggagcgccggctgcaggagcaggaggagctggagaattacatcgagcacgtgctgctccggcgcccgtga

SEQ ID NO: 25 - DNA, 1281 bp, Homo sapiens
atgagcgggggcgtctacggcggagatgaggtgggggcgctggtctttgacattggctccttctcagtccgcgctgggtacgctggggaggactgtcccaaggctgacttccccaccacagtggggctgctggccgcggaggaggggggcgggctggagctggagggggacaaagagaagaaagggaagatcttccacatcgacaccaatgccctgcacgtgcctcgggatggagcggaggtcatgtcgcccctcaagaatggcatgatcgaggactgggagtgcttccgagccatcctggatcacacctacagcaaacacgtcaagtctgagccaaacctgcacccagtgctcatgtccgaggctccgtggaacacacgggccaagcgggagaagctgacagagctgatgttcgagcagtacaacattcctgccttcttcttatgcaagacggctgtgctcaccgcctttgcaaacgggcggtccactggcctcgtgctggacagtggagccacccacaccacggccattccagtacatgacggctacgttctgcagcaaggcatcgtcaagtcccctctggcaggggacttcatctccatgcagtgccgggagctgttccaggagatggccattgacatcatcccaccttacatgatcgcagccaaggagcctgtccgggagggtgcccccccaaactggaagaagaaggagaagctaccccaggtctccaagtcctggcataactacatgtgtaatgaggtgatccaggacttccaggcctccgtgctgcaggtctcagactccccctacgatgaacaggtggctgcacaaatgcccacagtgcactacgagatgcccaatggctacaatacagactacggcgccgagcgactccgcatccctgagggcctgtttgatccctcgaacgtcaagggcctgtcggggaacaccatgttgggtgtgggccacgtggtgaccaccagcatcggcatgtgtgacattgatattcgcccgggcctgtacgggagtgtcattgtcaccggcgggaacacactgctgcagggcttcactgacaggctcaatcgagagctttcccagaagaccccaccgagcatgcgactgaaactcattgccagcaacagcaccatggagcgcaagttcagcccctggatcgggggttccatcctggcctcactgggcactttccagcagatgtggatctccaagcaggaatatgaggagggcgggaagcagtgcgtggagcgaaagtgcccctga

SEQ ID NO: 26 - DNA, 378 bp, Homo sapiens
atggagtccaaagagaaacgagcagtaaacagtctcagcatggaaaatgccaaccaagaaaatgaagaaaaggagcaagttgctaataaaggggagcccttggccctccctttggatgctggtgaatactgtgtgcctagaggaaatcgtaggcggttccgcgttaggcagcccatcctgcagtatagatgggatatgatgcataggcttggagaaccacaggcaaggatgagagaagagaatatggaaaggattggggaggaggtgagacagctgatggaaaagctgagggaaaagcagttgagtcatagtctgcgggcagtcagcactgacccccctcaccatgaccatcatgatgagttttgccttatgccctga

SEQ ID NO: 27 - DNA, 1446 bp, Homo sapiens
atggccgcggcgccgggagggtcagcgcagcccgctggccccggcccgcgcctgggtttcagcaccgcggacagcggcgtcggcatgagcgggctaaaccccggtcccgccgtacccatgaaggaccacgacgccatcaagctcttcgtggggcagatcccgcggggcttggacgagcaggacctcaagccgctgttcgaggagttcggccgcatctacgagctgacggtgctgaaggaccggctcaccggcctccacaaaggctgtgccttcctcacctactgcgcccgggactctgctctcaaggcccagagtgcactgcacgagcagaagaccctgccagggatgaatcgtccgatccaagtgaagccagctgccagtgagggccgaggagaggaccgaaagctgtttgtggggatgctgggcaagcagcagggtgaggaggacgtcagacgcctgttccagccctttggccacatcgaggagtgcacggtcctgcggagtcctgacggcaccagtaaaggctgtgcctttgtgaagttcgggagtcaaggggaagctcaggcggccatccggggtctgcacggcagccggaccatggcgggcgcctcgtccagcctcgtggtcaagctggcggacaccgaccgggagcgcgcgctgcggcggatgcagcagatggccggccacctgggcgccttccaccccgcgccactgccgctaggggcctgcggcgcctacaccacggcgatcctgcagcaccaggcggccctgctggcggcggcacagggcccaggcctaggcccggtggcggcagtggcggcccagatgcaacacgtggcggcctttagcctggtagctgcgcctctgttgcccgcggcagcagccaactccccgcctggcagcggccctggcaccctcccaggtcttccggcgcccatcggggtcaatggattcggccctctgaccccccagaccaatggccagccgggctccgacacgctctacaataacgggctctccccttatccagcccagagccccggcgtggctgaccccctgcagcaggcctacgctgggatgcaccactacgcagcagcctatccgtcggcctatgccccagtgagcacagcttttccccagcagccttcagccctgccccagcagcagagagaaggccccgaaggctgtaacctcttcatctatcacctgcctcaggagtttggtgatgcggaactcatacagacattcctgccctttggagccgttgtctctgctaaagtctttgtggatcgagccaccaaccagagcaagtgttttgggtttgttagttttgacaatccaactagtgcccagactgctattcaggcgatgaatggctttcaaattggcatgaagaggctcaaggtccagctaaagcggcccaaggatgccaaccggccttactga

SEQ ID NO: 28 - DNA, 387 bp, Homo sapiens
atgacttccttgtttgctcaagaaattcgcctttctaaaagacatgaagaaatagtatcacaaagattaatgttacttcaacaaatggagaataaattgggtgatcaacacacagaaaaggcatctcaactccaaactgttgagactgcttttaaaaggaaccttagtcttttaaaggatatagaagcagcagaaaagtcactacagaccaggattcacccacttccacggcctgaggtggtttctcttgagactcgttactgggcatcagtagaagaatatattcccaaatgggaacagtttcttttaggaagagcaccatatccttttgctgttgaaaatcaaaatgaagcagaaaataccattcaaaatgaggcacagcgataa

SEQ ID NO: 29 - DNA, 1360 bp, Homo sapiens
cggcccgggaggcggaggcgcgggggaggaggccccgcttggctcctcagccccggatgctgcatgacttcatccttccgccggctcccctgctgaggtagggccggtccggcagcaagcccgccgcccgcgccccgccgcagtcccgctcccgccccgcgcccaccccgcgcccgccatgtccgagatcctgccctacagcgaagacaagatgggccgcttcggcgcagaccccgagggctccgacctctccttcagctgccgcctgcaggacaccaactccttcttcgcgggcaaccaggccaagcgaccccccaagctgggccagatcggccgagccaagcgagtggtgatcgaggatgaccggatagacgacgtgctgaaggggatgggggagaagccgccgtccggagtgtagacgcgccggctcgggcggcgggctccgggcccagcctcgcagcggccaggagcgcgggccggcgatgcggctgccggcgcccccccgccccggcccaggcgcccgcgggcgggggctgcagggccgtgccgccgccgccgccaggcactccggagctgtccgcttcagcaccacggcggccgcggtagcggcggcgcggacccgcccggaacccgccgccgcgctcatgcactttaaaacctcgggccgcagccccaccccgcacaccggaacggacacggagacccgcggcccccagcccccggcccgccccctcccgcacggctcccctgccccgcccccctccggccagtctggtctgcagaccgggcggccgccggtgtcggaccgcgcgcggccagggatgtttggctgcgtacttgcatgagctttccacccacttgagcccagtcctccgggccgttcctcgcccccacccctgtctggcgtgaccccagcctcagcctctttctaagggacttcctcagcacatttgtatttttatatccgactctttgtttactggctctgctcatggttcctgccctcccctcagtctcggccacgctcttctgcgcctggcagataggatgggtgttgaggctgggatgagacaagcccccgacacggttaccaaccacatggccagtctgcccaggcctgaccccaggaggctttctggcagaccccttctccccaaggtatcatcaccttccaagggcccagatccgattttaccttggacccctgcgtcttgcccctgggaacccaaatggggactgctctgaacctttggatgacatctgtggccccggagatgttctcaacccaggggtgcccttcgtaaatgttcctccatcctcactgtaccaggagtgtgtgaataaacacagaccccctctg

SEQ ID NO: 30 - DNA, 1737 bp, Homo sapiens
atgcgcccggcgctcggccaccctcgctcggtctcctccgcgtccggttccttcccgccgcccccggcagccgcccggctgcagcccctcttcctccgcgggggctccttccgcggccggagaggctccggcgacagcagcaccagcaccagcaccagccgcgggggaggcggcggcagacgcggcgggggcggcggctccccgagcagcagcacgggcgccgagcgcgaggacgacgacgagagcctcagcgtcagcaagccgctggtgcccaacgccgcgctcctggggccgccggctcaggtgggcgcccccgccggccccgcgcctgtcgccttctcctcctcagcggccacctcctcctccacctccacgcccacctcctcctgcagcatgacagccgcggacttcggcgggggcgccgcggccggggccgtcgggggccccgggagccgctcggcggggggcgcgggcggcaccgggaccggcagcggcgcctcctgctgcccgtgttgctgctgctgcggctgcccagaccgccccggccgcagaggtcggcgccgcggctgcgcccccagtcccaggtgccgctggggctaccaggcgctgtccgtggtgctgctgctggcgcagggcggcctgctggacctgtacctcatcgccgtcaccgacctgtactggtgctcctggatcgccactgacctggtggtggtggtgggctgggccatcttcttcgccaagaacagccggggccgtcggggcggcgcagccagcggcgcgcacaaccaccacctgcaccaccaccacgccgcgccgcccctgcatctgcccgccccctcggccgctaccgctggggccaaggcacgcggagcccgcgggggcgccggcggcgcggggggcggcctgggggcggccgcggcagcgggcgagttcgccttcgcctacctggcctggcttatctactccatcgccttcactcccaaggtggtgctgatcctgggcacgtccatcctagacctcatcgagctacgcgcgcccttcggcaccacgggcttccgtctcaccatggcgctgtcggtgcccctgctctacagcttggtgcgggccatcagcgaggcgggcgcgcccccgggatcggcaggacccctgctgctgcagccccagcggcaccgcgcggccggatgcttcctgggcacgtgcttggacctgctcgacagcttcacgctggtggagctgatgctggagggccgcgtgccgctgcccgcgcacctgcgctacctgcttatcgccgtctacttcctcaccctcgcctcgccggtgctctggctctacgagctcaacgccgcggccgcagcggctgcatcctggggccaggcctccgggcctggcagctgcagccgccttctgcgcctgctgggcggctgcctggtggacgtgcccttgctggcgctgcgctgcctcctggtggtcagctaccagcagcccctctccatcttcatgctcaagaacctcttcttcctcggctgccggggcctggaggccctggagggctgctgggaccggggcaatcgggcctccccgagtcgggccagagggggctacggtgctccgccctccgcccctccaccacctccgccaccacctcagggaggctcccagctgggccactgcatctcggagaacgaggggggtgctcatggctatgtcaacaccctggctgtggcctctcagaattga

SEQ ID NO: 31 - DNA, 1665 bp, Homo sapiens; identical to SEQ ID NO: 13

SEQ ID NO: 32 - DNA, 732 bp, Homo sapiens
atggctgcggcgatagccagctccttgatccggcagaagcggcaggcgagggagtccaacagcgaccgagtgtcggcctccaagcgccgctccagccccagcaaagacgggcgctccctgtgcgagaggcacgtcctcggggtgttcagcaaagtgcgcttctgcagcggccgcaagaggccggtgaggcggagaccagaaccccagctcaaagggattgtgacaaggttattcagccagcagggatacttcctgcagatgcacccagatggtaccattgatgggaccaaggacgaaaacagcgactacactctcttcaatctaattcccgtgggcctgcgtgtagtggccatccaaggagtgaaggctagcctctatgtggccatgaatggtgaaggctatctctacagttcagatgttttcactccagaatgcaaattcaaggaatctgtgtttgaaaactactatgtgatctattcttccacactgtaccgccagcaagaatcaggccgagcttggtttctgggactcaataaagaaggtcaaattatgaaggggaacagagtgaagaaaaccaagccctcatcacattttgtaccgaaacctattgaagtgtgtatgtacagagaaccatcgctacatgaaattggagaaaaacaagggcgttcaaggaaaagttctggaacaccaaccatgaatggaggcaaagttgtgaatcaagattcaacatag

SEQ ID NO: 33 - DNA, 1198 bp, Homo sapiens
atggcggtcctggcccgccagctgcagcgtctcctctggaccgcttgcaagaaaaaggagagggagaaggaggggagggaggaagaggaggaggaggaggcggggcgcagggcccccgaagggcctcggtctctgttgacagcgccgcgccgcgcccagcggccgcacgggggtgccgaggcgtctgggggcctgcgcttcggggcgagcgcagcgcaaggctggcgcgcgcgcatggaggatgctcactgcacttggctttcgttacctggtctgcccccgggctgggccttgtttgccgtcctcgacggccacggtggggctcgagctgcccgcttcggtgcacgccatttgccaggccatgtgctccaggagctgggcccggagcctagcgagcccgagggcgtgcgcgaggcgctgcgccgagccttcttgagcgccgacgagcgcctgcgctccctctggccccgcgtggaaacgggcggctgcacggccgtggtgttgctggtctccccgcggtttctgtacctggcgcactgcggtgactcccgcgcggtgctgagccgcgctggcgccgtggccttcagcacagaggaccaccggccccttcgaccccgggaacgcgagcgcatccacgccgctggcggcaccatccgccgccgccgcgtcgagggctctctggccgtgtcgcgagcgttgggcgactttacctacaaggaggctccggggaggccccccgagctacagctcgtttctgcggagccagaggtggccgcactggcacgccaggctgaggacgagttcatgctcctggcctctgatggcgtctgggacactgtgtctggtgctgccctggcgggactggtggcttcacgcctccgcttgggcctggccccagagcttctctgcgcgcagctgttggacacgtgtctgtgcaagggcagcctggacaacatgacctgcatcctggtctgcttccctggggcccctaggccttctgaggaggcgatcaggagggagctagcactggacgcagccctgggctgcagaatcgctgaactgtgtgcctctgctcagaagccccccagcctgaacacagttttcaggactctggcctcagaggacatcccagatttacctcctgggggagggctggactgcaaggccactgtcattgctgaagtttattctcagatct

SEQ ID NO: 34 - DNA, 1359 bp, Homo sapiens
atggacgcgcccgcccggctgctggccccgctcctgctcctctgcgcgcagcagctccgcggcaccagagcgatgaatgacatcggcgactacgtgggctccaacctggagatctcctggctccccaacctggacgggctgatagccggctacgcccgcaacttccggcctggcatcggaggcccccccgtgaatgtggcccttgccctggaggtggccagcatcgaccacatctcagaggccaacatggagtacaccatgacggtgttcctgcaccagagctggcgggacagcaggctctcctacaaccacaccaacgagaccctgggtctggacagccgcttcgtggacaagctgtggctgcccgacaccttcatcgtgaacgccaagtcggcctggttccacgacgtgacggtggagaacaagctcatccggctgcagcccgacggcgtgatcctgtacagcatccgaatcacctccactgtggcctgcgacatggacctggccaaataccccatggacgagcaggagtgcatgctggacctggagagctacggttactcatcggaggacatcgtctactactggtcggagagccaggagcacatccacgggctggacaagctgcagctggcgcagttcaccatcaccagctaccgcttcaccacggagctgatgaacttcaagtccgctggccagttcccacggctcagcctgcacttccacctgcggaggaaccgcggcgtgtacatcatccaatcctacatgccctccgtcctgctggtcgccatgtcctgggtctccttctggatcagccaggcggcggtgcccgccagggtgtctctaggcatcaccacggtgctgacgatgaccacgctcatggtcagtgcccgctcctccctgccacgggcatcagccatcaaggcactggacgtctacttctggatctgctatgtcttcgtgtttgccgccctggtggagtacgcctttgctcatttcaacgccgactacaggaagaagcagaaggccaaggtcaaggtctccaggccgagggcagagatggacgtgaggaacgccattgtcctcttctccctctctgctgccggcgtcacgcaggagctggccatctcccgccggcagcgccgcgtcccggggaacctgatgggctcctacaggtcggtgggggtggagacaggggagacgaagaaggagggggcagcccgctcaggaggccaggggggcatccgtgcccggctcaggcccatcgacgcagacaccattgacatttacgcccgcgctgtgttccctgcggcgtttgcggccgtcaatgtcatctactgggcggcatacgccatgtga

SEQ ID NO: 35 - DNA, 1065 bp, Homo sapiens
atgggatgtactctgagcgcagaggagagagccgccctcgagcggagcaaggcgattgagaaaaacctcaaagaggatggcatcagcgccgccaaagacgtgaaattactcctgctcggggctggagaatcaggaaaaagcaccattgtgaagcagatgaagatcatccatgaagatggcttctccggagaagacgtgaaacagtacaagcctgttgtctacagcaacactatccagtccctggcagccatcgtccgggccatggacactttgggcatcgaatatggtgataaggagagaaaggctgacgccaagatggtgtgtgatgtggtgagtcggatggaagacaccgagcccttctctgcagagctgctttctgccatgatgcggctctggggcgactcaggaatccaagagtgcttcaaccggtcccgggagtatcagctcaacgactctgccaaatactacctggacagcctggatcggattggggccgccgactaccagcccaccgagcaggacatcctccgaaccagggtcaaaaccactggcatcgtagaaacccacttcacattcaagaacctccacttcaggctgtttgacgtcggaggccagcgatctgaacgcaagaagtggatccattgcttcgaggacgtcacggccatcattttctgtgtcgcgctcagcggctatgaccaggtgctccacgaagacgaaaccacgaaccgcatgcacgagtctctcatgctcttcgactccatctgtaacaacaagttcttcatcgatacctccatcattctcttcctcaacaagaaagatctctttggcgagaagatcaagaagtcacctttgaccatctgctttcctgaatacacaggccccaatacctatgaagacgcagccgcctacatccaagcacaatttgaaagcaaaaaccgctcacccaacaaagaaatatattgtcacatgacttgtgccacagacacgaataacatccaggtggtgttcgacgccgtcaccgacatcatcattgccaacaacctccggggctgcggcttgtactga

SEQ ID NO: 36 - DNA, 228 bp, Homo sapiens
atgaaagagggcatgtctaataacagcaccactagcatctcccaagccaggaaagctgtggagcagctaaagatggaagcctgtatggacagggtcaaggtctcccaggcagctgcggacctcctggcctactgtgaagctcacgtgcgggaagatcctctcatcattccagtgcctgcatcagaaaacccctttcgcgagaagaagttcttttgtaccattctctaa

SEQ ID NO: 37 - DNA, 1248 bp, Homo sapiens
atggagcgcgcgccgcccgacgggccgctgaacgcttcgggggcgctggcgggcgaggcggcggcggcgggcggggcgcgcggcttctcggcagcctggaccgcggtgctggccgcgctcatggcgctgctcatcgtggccacggtgctgggcaacgcgctggtcatgctcgccttcgtggccgactcgagcctccgcacccagaacaacttcttcctgctcaacctcgccatctccgacttcctcgtcggcgccttctgcatcccactgtatgtaccctacgtgctgacaggccgctggaccttcggccggggcctctgcaagctgtggctggtagtggactacctgctgtgcacctcctctgccttcaacatcgtgctcatcagctacgaccgcttcctgtcggtcacccgagcggtctcataccgggcccagcagggtgacacgcggcgggcagtgcggaagatgctgctggtgtgggtgctggccttcctgctgtacggaccagccatcctgagctgggagtacctgtccgggggcagctccatccccgagggccactgctatgccgagttcttctacaactggtacttcctcatcacggcttccaccctggagttctttacgcccttcctcagcgtcaccttctttaacctcagcatctacctgaacatccagaggcgcacccgcctccggctgaaggggcacggggaggccatgccgctgcacaggtatggggtgggtgaggcggccgtaggcgctgaggccggggaggcgaccctcgggggtggcggtgggggcggctccgtggcttcacccacctccagctccggcagctcctcgaggggcactgagaggccgcgctcactcaagaggggctccaagccgtcggcgtcctcggcctcgctggagaagcgcatgaagatggtgtcccagagcttcacccagcgctttcggctgtctcgggacaggaaagtggccaagtcgctggccgtcatcgtgagcatctttgggctctgctgggccccatacacgctgctgatgatcatccgggccgcctgccatggccactgcgtccctgactactggtacgaaacctccttctggctcctgtgggccaactcggctgtcaaccctgtcctctaccctctgtgccaccacagcttccgccgggccttcaccaagctgctctgcccccagaagctcaaaatccagccccacagctccctggagcactgctggaagtga

SEQ ID NO: 38 - DNA, 1701 bp, Homo sapiens
atgccaaggggattcctggtgaagcgaactaaacggacaggcggcttgtaccgagttcgccttgcggagcgtgtcttccctctgctggggccccagggggcgccgcccttcttggaggaggctcccagcgcctccttgcccggcgcggagcgggcgacaccccccacccgagaggaaccaggaaaggggttgacggcggaggcggcccgggaacagtcggggtcgccatgtcgggcggctggggtgagcccggggacgggcgggcgggaaggcgcggagtggcgggcgggtggcagggaaggtcccgggcccagccccagccccagccccagtccagcgaagccggcaggcgcagagctgcgtcgggcgttcctggagcgctgcctcagctcgcccgtctccgccgagtctttccccgggggcgccgccgccgtggccgctttctcctgctccgtggcgccagcagccgcaccgaccccgggggagcagtttctgctgccgcttcgggcgccgttcccagagcccgcgcttcagccggaccctgcgcccctctcggccgcccttcagagtctgaagcgggcggccggcggcgagcgccgcggcaaggcacccacggactgcgcgtctggacccgcggccgcgggaatcaagaagccaaaggccatgaggaagttgagctttgccgatgaggtgaccacatcccctgtcctgggcctgaagatcaaggaggaggagcccggagcgccgtcccggggcttggggggcagccgcacgccactgggggagttcatctgccagctgtgcaaggagcagtacgcagaccccttcgcgctggcccagcaccgctgctcccgcatcgtgcgcgtagagtaccgctgccctgagtgcgacaaggtgttcagctgtcctgcgaacctggcctcccatcgccgctggcataagccgcgtcctgcggctgcaaacgccgccacagtctcctccgccgacgggaagccgccttcttcgtcgtcttcgtcctcccgggactccggggccattgcatcttttctggcggagggaaaggagaacagccgaatagagcggactgcggatcagcacccgcaggccagggacagctccggggcggatcagcacccggacagcgccccgaggcagggcctccaggtgctgacgcatccagagccaccgctgcctcagggcccctacacggagggggtgttggggcgccgggtacctgtgccgggcagtaccagtggtggcaggggatccgagattttcgtgtgcccatattgccacaaaaagtttcgtcgccaagcctatctgcgcaagcacctgagcactcacgaggcgggctcggcccgtgcgctagcgccgggctttggctccgaacgcggtgccccacttgccttcgcttgcccattgtgcggagcgcacttccctacagcagatatcagggagaagcaccggctgtggcatgctgtccgcgaggagctgctcctgcccgctctggcgggggctcctcccgaaacgtcgggccctagcgggccatctgacgggagtgcccagcaaattttctcgtgcaagcactgcccgtccactttttttagctctccagggctgacccggcacatcaataagtgccacccctcagaaagccggcaagtgctgctgctgcagatgccactgcggcctggctgctga

SEQ ID NO: 39 - DNA, 1185 bp, Homo sapiens
atgaagcggcagaacgtgcgcacgctggcgctcatcgtgtgcaccttcacctacctgctggtgggcgccgcggtcttcgacgcgctggagtcggagcccgagctgatcgagcggcagcggctggagctgcggcagcaggagctgcgggcgcgctacaacctcagccagggcggctacgaggagctggagcgcgtcgtgctgcgcctcaagccgcacaaggccggcgtgcagtggcgcttcgccggctccttctacttcgccatcaccgtcatcaccaccatcggctacgggcacgcggcacccagcacggatggcggcaaggtgttctgcatgttctacgcgctgctgggcatcccgctcacgctcgtcatgttccagagcctgggcgagcgcatcaacaccttggtgaggtacctgctgcaccgcgccaagaaggggctgggcatgcggcgcgccgacgtgtccatggccaacatggtgctcatcggcttcttctcgtgcatcagcacgctgtgcatcggcgccgccgccttctcccactacgagcactggaccttcttccaggcctactactactgcttcatcaccctcaccaccatcggcttcggcgactacgtggcgctgcagaaggaccaggccctgcagacgcagccgcagtacgtggccttcagcttcgtctacatccttacgggcctcacggtcatcggcgccttcctcaacctcgtggtgctgcgcttcatgaccatgaacgccgaggacgagaagcgcgacgccgagcaccgcgcgctgctcacgcgcaacgggcaggcgggcggcggcggagggggtggcagcgcgcacactacggacaccgcctcatccacggcggcagcgggcggcggcggcttccgcaacgtctacgcggaggtgctgcacttccagtccatgtgctcgtgcctgtggtacaagagccgcgagaagctgcagtactccatccccatgatcatcccgcgggacctctccacgtccgacacgtgcgtggagcagagccactcgtcgccgggagggggcggccgctacagcgacacgccctcgcgacgctgcctgtgcagcggggcgccacgctccgccatcagctcggtgtccacgggtctgcacagcctgtccaccttccgcggcctcatgaagcgcaggagctccgtgtga

SEQ ID NO: 40 - DNA, 630 bp, Homo sapiens
atgggctccgtgtccaaccagcagtttgcaggtggctgcgccaaggcggcagaagaggcgcccgaggaggcgccggaggacgcggcccgggcggcggacgagcctcagctgctgcacggtgcgggcatctgtaagtggttcaacgtgcgcatggggttcggcttcctgtccatgaccgcccgcgccggggtcgcgctcgaccccccagtggatgtctttgtgcaccagagtaagctgcacatggaagggttccggagcttgaaggagggtgaggcagtggagttcacctttaagaagtcagccaagggtctggaatccatccgtgtcaccggacctggtggagtattctgtattgggagtgagaggcggccaaaaggaaagagcatgcagaagcgcagatcaaaaggagacaggtgctacaactgtggaggtctagatcatcatgccaaggaatgcaagctgccaccccagcccaagaagtgccacttctgccagagcatcagccatatggtagcctcatgtccgctgaaggcccagcagggccctagtgcacagggaaagccaacctactttcgagaggaagaagaagaaatccacagccctaccctgctcccggaggcacagaattga

SEQ ID NO: 41 - DNA, 10079 bp, Homo sapiens
gaggcgctgcaggggacgcgggggaagtggcggcgccggcagcggacagctcggacagcgcccagggccggagcccgagcccttggaggttgattgacttatgtgcaatttgggacgctggagtttaccttccctccgcagcctggaacagagcctcctctggtgttgcaaggaagaggctgaatgaggcagagaagctgagtgctgtccaggaggcccagttaaagcggctcgaggtgacaagaccccgagtgctggggagcagggagcagggccaggtgccgaggatggccaggcagccaccgccgccctgggtccatgcagccttcctcctctgcctcctcagtcttggcggagccatcgaaattcctatggatctgacgcagccgccaaccatcaccaagcagtcagcgaaggatcacatcgtggacccccgtgataacatcctgattgagtgtgaagcaaaagggaaccctgcccccagcttccactggacacgaaacagcagattcttcaacatcgccaaggacccccgggtgtccatgaggaggaggtctgggaccctggtgattgacttccgcagtggcgggcggccggaggaatatgagggggaatatcagtgcttcgcccgcaacaaatttggcacggccctgtccaataggatccgcctgcaggtgtctaaatctcctctgtggcccaaggaaaacctagaccctgtcgtggtccaagagggcgctcctttgacgctccagtgcaaccccccgcctggacttccatccccggtcatcttctggatgagcagctccatggagcccatcacccaagacaaacgtgtctctcagggccataacggagacctatacttctccaacgtgatgctgcaggacatgcagaccgactacagttgtaacgcccgcttccacttcacccacaccatccagcagaagaaccctttcaccctcaaggtcctcaccaaccacccttataatgactcgtccttaagaaaccaccctgacatgtacagtgcccgaggagttgcagaaagaacaccaagcttcatgtatccccagggcaccgcgagcagccagatggtgcttcgtggcatggacctcctgctggaatgcatcgcctccggggtcccaacaccagacatcgcatggtacaagaaaggtggggacctcccatctgataaggccaagtttgagaactttaataaggccctgcgtatcacaaatgtctctgaggaagactccggggagtatttctgcctggcctccaacaagatgggcagcatccggcacacgatctcggtgagagtaaaggctgctccctactggctggacgaacccaagaaccttattctggctcctggcgaggatgggagactggtgtgtcgagccaatggaaaccccaaacccactgtccagtggatggtgaatggggaacctttgcaatcggcaccacctaacccaaaccgtgaggtggccggagacaccatcatcttccgggacacccagatcagcagcagggctgtgtaccagtgcaacacctccaacgagcatggctacctgctggccaacgcctttgtcagtgtgctggatgtgccgcctcggatgctgtcgccccggaaccagctcattcgagtgattctttacaaccggacgcggctggactgccctttctttgggtctcccatccccacactgcgatggtttaagaatgggcaaggaagcaacctggatggtggcaactaccatgtttatgagaacggcagtctggaaattaagatgatccgcaaagaggaccagggcatctacacctgtgtcgccaccaacatcctgggcaaagctgaaaaccaagtccgcctggaggtcaaagaccccaccaggatctaccggatgcccgaggaccaggtggccagaaggggcaccacggtgcagctggagtgtcgggtgaagcacgacccctccctgaaactcaccgtctcctggctgaaggatgacgagccgctctatattggaaacaggatgaagaaggaagacgactccctgaccatctttggggtggcagagcgggaccagggcagttacacgtgtgtcgccagcaccgagctagaccaagacctggccaaggcctacctcaccgtgctaggacggccagaccggccccgggacctggagctgaccgacctggccgagaggagcgtgcggctgacctggatccccggggatgctaacaacagccccatcacagactacgtcgtccagtttgaagaagaccagttccaacctggggtctggcatgaccattccaagtaccccggcagcgttaactcagccgtcctccggctgtccccgtatgtcaactaccagttccgtgtcattgccatcaacgaggttgggagcagccaccccagcctcccatccgagcgctaccgaaccagtggagcaccccccgagtccaatcctggtgacgtgaagggagaggggaccagaaagaacaacatggagatcacgtggacgcccatgaatgccacctcggcctttggccccaacctgcgctacattgtcaagtggaggcggagagagactcgagaggcctggaacaacgtcacagtgtggggctctcgctacgtggtggggcagaccccagtctacgtgccctatgagatccgagtccaggctgaaaatgacttcgggaagggccctgagccagagtccgtcatcggttactccggagaagattatcccagggctgcgcccactgaagttaaagtccgagtcatgaacagcacagccatcagccttcagtggaaccgcgtctactccgacacggtccagggccagctcagagagtaccgagcctactactggagggagagcagcttgctgaagaacctgtgggtgtctcagaagagacagcaagccagcttccctggtgaccgcctccgtggcgtggtgtcccgcctcttcccctacagtaactacaagctggagatggttgtggtcaatgggagaggtgatgggcctcgcagtgagaccaaggagttcaccaccccggaaggagtacccagtgcccctaggcgtttccgagtccggcagcccaacctggagacaatcaacctggaatgggatcatcctgagcatccaaatgggatcatgattggatacactctcaaatatgtggcctttaacgggaccaaagtaggaaagcagatagtggaaaacttctctcccaatcagaccaagttcacggtgcaaagaacggaccccgtgtcacgctaccgctttaccctcagcgccaggacgcaggtgggctctggggaagccgtcacagaggagtcaccagcacccccgaatgaagcttacaccaacaaccaagcggacatcgccacccagggctggttcattgggcttatgtgcgccatcgccctcctggtgctgatcctgctcatcgtctgtttcatcaagaggagtcgcggcggcaagtacccagtacgagaaaagaaggatgttccccttggccctgaagaccccaaggaagaggatggctcatttgactatagtgatgaggacaacaagcccctgcagggcagtcagacatctctggacggcaccatcaagcagcaggagagtgacgacagcctggtggactatggcgagggtggcgagggtcagttcaatgaagacggctccttcatcggccagtacacggtcaaaaaggacaaggaggaaacagagggcaacgaaagctcagaggccacgtcacctgtcaatgctatctactctctggcctaacggagcccacccaggcacagccaccactttgcaagtgggaggaggggagaaggggagacaaaaccactgcagacctaccacgaagccaccaccaccttcagtaacaagggtacgatatgggggtctgccaagctgtgaggaccagtagccaccaagccacccacaagccccctcccaatgaccccccttcagccccgggtgccaccagtgtgggagagctggagccgtggctgagctcagctggagggagcctggccccttgcccggtctcgcagccaccccgagcgttccaccacactgtccgcccttggcctcggcacacgctcaccttttctgttggttacgggacttctcattgtcttaatttcgctttgtgcatcttcccctccagacccaatgtctctgttttcttttccttttgaaaaagagtccctggaaaagaaagaataagtggattctcccccaggagaatcctttttgcaaagataggcaaaaaggattgaatccataccagaacacgtagacaggctgtaatattcaaaccacctctgggccaatgcatttccaaaggatgcctttctcgccatatgcctcccctggcccccagcccctctgcctcggccttgtcagttgctgagctgggcttggctcctttctggaaaatgacagtatttttggcagggagaaggtgcgcaggcctccttgctgctctctggtttggttgggaggtgtgtttacctcttgctcctcattcctcccctgcccttttctctggaatatctaagatgtgagctgcattgactctgaagacgtttgaggaacaggagtgggcactgatagaaaggacttcaacgccagtgactgtgtacctccagcagaagaaaatcaggtgtctggtcttgggggcactgtgctcacttctagagagaagaaaaaggctgggtttggacttcatgcctcctcactggtgaaacccaggatgtagatagagggccacacccaccctgtccagagtagagggcacctgtccacgtggccagggcccatgctgccaccctcgaggagatggaaccctgtgatgcaaaagctttgctggtgtgtttggggcataaggcactgctccccttccatctctagcagatatcatcttctcagccaattctgtaggacactgaggctcttgtttgacatggtgtgtggatggggacttgccccaagactgagcaggtctgccctttcattggggtgtatacatatcaggggaccctgaggtggcaccgtactcagtgttgtgatgcccccacctagggaggactcaatgctctttgtatgccttatgcagcgctgatctgtccctggagttcccaggttcccagctccccccctgcaagccttgaagcctccagcaacgtctatctccaggagagcagggcagcctatgcaagtgttccggcaggaccagaagtggccactcaacacacgtcctcaccagtcaccccaaatggagacactcgcagacctgcagttctcagaccgaaggtgctgccttcatcctccccacctaatgcatttttgaaaccaaaggtacctagcctcagagacagagaaggagagggggagatcttgagtctaagaggaaccctttagctgtttctgcagctgaggtcagtttcaggagggtgaagctgatccccaggaatggatcagctgccatgggcacagcctccgatttgagcctctccggctgccagccagggggcctgggccagaccagggctctgtccttccgtgactttattaaagcaacatttgccacatgtttaagccgcaaaggtattagcaatgcttgcatcattaataatcattcagttgaaggtcaagcccatagacacacactctctgctggtaagaaaccatagcccagaactgagccaataaggttgtttgaacctgagagtgtgtaatggtcatttgggccaagcctcagctagggctgctgcctggacgcctgaggggcagcttatcacagtgcaaggggacagggtaaacagcagggggtggggtgtgagcttggagggcccctcccctggatttcctccaacacctgcttggatactaggcccactgtccctgaagggaatgtcagggaagtgtgcctgtgagctgaattaaaggactggcctttccagaaaacgctttggatctgagcagagtagtcagtttctcagacactcattccatactgcaccgtacatgccagcgtacccattgcaccgaaagcaggcccttagggcaggaagggacgatgagcaagtctgccacaccacctggtgactgggaagggctgcttctctcgtaagggtcttggggagaagtaagcccgcagcctgcctctgcacctcgttccagtgtcctgccaggctctgtactgtcctttgtgtatgaagaaaatgctgttagccctctctcaggctgctgttctgtgggtgctgagagctgccccccatcaccacgccatcacacccctctgagcagaagcaaatctgaggctgaagaattaagttttccccaagcaaggaaggcaggtggtcagagagatcaaacgctgaggcgtggggattgcaggattcaggaggcagcccctttggggaagaggagggtgcattttccatggagcccatgtcagagtccactccagctcagcaggaaagtggaattgcccagtactgcctgccagctgggtctcccaagcaactaccccaagacataccaacagtgaagccaggacagcaccatgccatcggcgctccagtctgtctggctgggaggaaagtgctgggcatcttacagtaactctagaagttcctttgactaggctgcaatcccacctatatgctcagccctaagagctgtggtttcctgtgctctcatttgtccattcattcattcattcattcattcagcaaataatctgaaatccagtctgaactaaggcctgagctgtggataccatggcgcgtgagttagatgtggtccctgccctcatggggctgacagtcctaaaatcaagtgctaggacacagtggccattgagctgggagcattcttccctctaccgcttaagccactgatggctgcgagcttgaagagagggattctgagggagagcttggtccatctggtcaccaaggctgggcgggacagagcagtcaagaaccacggtgtggcttgagaaacagtcctgcttcctgagcctctttgctctgcctcttggggcaagctccttaacctgtctgtatttttatgcctctgtctcccattcagttcctccttgaatacctctttctacagagaggcacgggctcccctgaaggattgtcgaggccagggttcgggaagtacactgccatcggtcaggggacagctgcctcccaccttgcctgggtgatggtgaatgggactcatcttttcctgccttgcttttgaggagatggttgaatttaagctaacaggaaagccaaaccagcaccctcctttgtgctctgagaggttggagacatctggtccaccccattgcccctgcccctggcaagccctgaagtcgggagaggtgaccacaggtctgaaaatcagccagtgccaacattgcttgccctgcaaggtgcaactgagcccacatagcgcattcatagtttccctgaccacagccttgggaagacggtggaaacccgaggatgtgtgggtttcccagctaacggacaagctcccctgccacacccagtgcccacgcatgctcacatacatacagcagaccacaaccctgttgccaagcagtgcttccaagggatagcgatccagattccaacattgtcttggagagggttagtccacatccaagttgcgtgagataagatgcaaagggctctgtgtggatgaggaacgcaccttagaggagtgggaaaggccaccagggttgggccctgtttaggtaattcctgttggcagcacctagagagagcatctgagctgaaggagtgggaaactttgcccaagcaatggcacgggcagcgggctctttctggcgccctgtgctggagcagggccaagtcttagggcatcacaaacagcccatttgatggagggagcagggacatagcacatttttgtctgtctttgtgaggctgctttgctaactctctgaggagaggaagcctctcgggctttccgtcggctggggctagtgccagagaatcccttctcagtggccagcaggttcctgggaggccggcacaaggcaccgctccccactcatgacaccttggtgcagagtgacctcctgcccagtcaccactccggccagccccagccaaacacacaaaagcccatggttgcggttgcatctacaccgttagttggcaaaggatcctgcttgagctctgcgtggtggccaaggagtagcatggaggagggccctgattttaaaaaggaaaaatagagaggcctcaaaacaatgaaacaaagagcttgatatgtcaagaggagaccaaggccctgggaggcataggcaagccgggcagagtcagaccagtgccctcccttgaccatctcctagcattccttaacctagacaggggctaccccatgtgagtccaagccagactttgtggctgtccccagcctgcacagcccaagcccagggaagtgtcctttctttcccttccttactaataatgggccttcctgagacacattcagagaaggatcagagagaaaggagaaccatccaggagagccacaagcgtccaccaaacagtgtctcaggcctcacctgaagctgctgttcctcctatcagcacactagtattaaatgggtgttccataatgaggagaatggaaataggtacaaggcatctagcttaggacagaatcggatttcggcatgtgaaggaatcccagagctgatctcattgaaatgatctatcgtacagacaaggatatgcaaatccacagaagtgaagggatttttgctcaagatcacatagctggtaaactaaggtaaggttagggcttgaacttgggccttctgactccttgtccagtcagtgttctttcatctcaccacagctgcctcctttgaaacagaggtattaagatctgtccttctggttcaccctctcatacctctttactgcgtctcccacatcccccacatgcctcccaaaatgaaagacaaacaggattgtttctgagaccaagatcagtctgtctgtgatcagcctgtgtgtggttcacccagtcatgcaattaagggcagatctgggccagtggaataggatagctgattggtgtttgttactgtgaaccctagaccgtaccccgtagaatggtgtctcttgctttgtaacacatcgggccttcagtgtgctgtattcctcagaagtgagggcatctcggtccattctgcccatggccacagggtgcagagaggcagcagggcccatgcaagctgccaccctgggatttgctgggctggagttcaacagatgtaaagacttcagtgaagcaataaacacaaaactctgggagaagatatccagaattttgtacattactctgtttctttttcaaaaatgaggcagatcagatgcccctgagctgcccctttttttctgattcccaactgcaatgtcctcagtcagtgttgtccctctgcccggctccccagctctttgccaacctcttcacactccccttgagctgagcatcagtcgcctgtgacgtggccaccttctgtcctgctcccactcccgacccatgctggaccccggaggacctcctgccccgcccccaccacacacccatatcccccaccattccaatttgttctttcccgtggggaattttttttcccagcgtctccatcccttcctacatatccacacacacacaaattggtctgatcttttttccattggttaaacatttaactccatgccagaccttgttttaacccctctcacatcatgttctttccttttttgcgagttattttgcattaaccaactttgtcagtgacagatgcgtatctgagggtgtcacacacgaccttcagcagggaagacttctgggccatggagggccgtctaatacatggacttataaactgactgcatgagcaatgaaaaggccaaattattctgaattttttttgaatcactgtaaaaaaactgatttcttttgtatagagaacactaaacgtataataaaagttgttcaaaatgg

SEQ ID NO: 42 - DNA, 1458 bp, Homo sapiens
atgtcggtgccgctgctcaagatcggggtcgtgctgagcaccatggccatgatcactaactggatgtcccagacgctgccctcgctggtgggcctcaacaccaccaagctctcggcggccggcggcgggacgctggaccgcagcaccggcgtgctgcccaccaaccctgaggagagctggcaggtgtacagctctgcccaggacagcgagggcaggtgtatctgcacagtggtcgctccacagcagaccatgtgttcacgggatgcccgcacaaaacagctgaggcagctactggagaaggtgcagaacatgtctcaatccatagaggtcttggacaggcggacccagagagacttgcagtacgtggagaagatggagaaccaaatgaaaggactggagtccaagttcaaacaggtggaggagagtcataagcaacacctggccaggcagtttaaggcgataaaagcgaaaatggatgaacttaggcctttgatacctgtgttggaagagtacaaggccgatgccaaattggtattgcagtttaaagaggaggtccagaatctgacgtcagtgcttaacgagctgcaagaggaaattggcgcctatgactacgatgaacttcagagcagagtgtccaatcttgaagaaaggctccgtgcatgcatgcaaaaactagcttgcgggaagttgacgggcatcagtgaccccgtgactgtcaagacctccggctcgaggttcggatcctggatgacagaccctctcgcccctgaaggcgataaccgggtgtggtacatggacggctatcacaacaaccgcttcgtacgtgagtacaagtccatggttgacttcatgaacacggacaatttcacctcccaccgtctcccccacccctggtcgggcacggggcaggtggtctacaacggttctatctacttcaacaagttccagagccacatcatcatcaggtttgacctgaagacagagaccatcctcaagacccgcagcctggactatgccggttacaacaacatgtaccactacgcctggggtggccactcggacatcgacctcatggtggacgagagcgggctgtgggccgtgtacgccaccaaccagaacgctggcaacatcgtggtcagtaggctggaccccgtgtccctgcagaccctgcagacctggaacacgagctaccccaagcgcagcgccggggaggccttcatcatctgcggcacgctgtacgtcaccaacggctactcagggggtaccaaggtccactatgcataccagaccaatgcctccacctatgaatacatcgacatcccattccagaacaaatactcccacatctccatgctggactacaaccccaaggaccgggccctgtatgcctggaacaacggccaccagatcctctacaacgtgaccctcttccacgtcatccgctccgacgagttgtag

SEQ ID NO: 43 - DNA, 4183 bp, Homo sapiens
atgtaacaggtcatgtggcagcctcctagggacacgcgtggggtctggagcgggacacgcgtgtgcagccgggccttacgtgtggctcaaggggcggtgggcgagagagacgtggacacaagtggggtggggcacgtgagggtctggggaatagaaccaggggttccatgcgccctcctccttgtctggggcgggtcttaggttggcgggagagcccagcggggacctagcgacaaggggggctggcagcctccggggctctgggccctgggagagggcggggggtgggggggattagcgttgcctgagcggcgcgtagggggtagggggagggactgagaggcgggcgggcctggagcaaacgggagccgcgctgccttcacagctcagctgggcccagcctctcctctgtctctcctcggtctcagctctgggcgagcagcggcctgtctgaagagcatgcagcccccttactccccgcctggcctcgccatccctgcccccccagcctgacccccggccccagcatggcccagggtgccatgcgcttctgctcggaaggcgactgtgccatctccccaccacgatgcccacgccgctggctccccgaaggcccggtgccccagagccccccagccagcatgtatggcagcacaggctccttgctacggcgagtggcaggtccaggtcctcgaggccgggaactgggacgtgtgacagcaccctgtacacctctgcgtggccccccctcaccccgtgttgctccctcaccctgggcaccctcttcacccactgggcagcccccacccggggcccagagctctgtggtcatcttccgctttgtggagaaggccagtgtgaggccactgaatgggctacctgctccagggggcttgagtcggagctgggatctgggtggggtttctcctcccaggcccaccccagcccttgggcctggctccaaccggaagttacggctggaagcatccacatcagacccactccccgccagaggaggctcggccctacctggcagccggaaccttgtacatgggccgccagccccaccccaggttggagcagatggcctttactcctctctccccaatgggctggggggcccccctgagcgcctggccacactcttcggaggacctgctgacactggattcctgaaccagggggatacctggtcctccccccgggaagtctcctctcatgcccagagaatcgctagagccaaatgggaattcttctatggctccttggacccccccagctcaggtgctaagcccccagagcaggcccccccatctccacctggggtgggctcaaggcagggctctggggtggctgtggggcgagcagccaagtactccgagacagacctggacacggtgcccctgaggtgctaccgcgagactgacatcgatgaggtgctggctgagcgggaggaggccgactcggccatcgaaagtcagcccagctctgagggcccaccaggcactgcctacccacctgccccacggcccggcccactccctggccctcatcccagcctcggcagtggcaatgaggatgaggacgacgatgaggcaggtggggaagaagatgtggacgacgaggtgtttgaggcctctgaaggggcccggccagggagccggatgcctctcaagtcacctgtgccctttctacctgggacgagcccctcggctgatgggcctgactctttcagttgtgtgttcgaagccatcctggagtcacaccgggccaaaggcacctcctataccagcctcgcctcgctggaggccttggcctcacctggcccaacccagagccccttcttcacctttgagctgcctccccaaccccctgcaccccggcccgacccaccagctcccgccccacttgcccctcttgaaccggattctggtaccagctctgctgctgatggtccttggacacagagaggggaggaggaggaggcagaggccagagccaagctggccccagggagggagccccctagtccctgccactcagaggacagccttgggctgggggcagcaccccttggcagcgaaccacccctgagccagctggtgtccgactcagactcagagctggacagcacagagcggctggccctgggaagcacagacaccttgtccaatgggcagaaagcggacctggaggctgcgcagcgcctggccaagaggctgtaccgactagatggcttcaggaaggccgatgtggcccggcacctgggcaagaacaatgacttcagcaaactggtggctggggagtacctcaagttctttgtcttcacgggcatgactctggaccaagctctcagggtgtttctgaaggagctggccttaatgggtgagacccaggaacgagagcgcgtgctggcccacttctcccagcgatacttccagtgcaatcctgaagccctgtcctcagaggacggcgcccacacgctgacctgtgcgctcatgctgctcaacacggatctccacggccataacatcgggaagcgcatgacctgcggggacttcatcgggaacctggagggcctcaatgatggcggcgacttccctagggagctgctcaaggccttgtacagctccatcaagaatgagaagctgcagtgggccatagacgaggaggagctgagacgctctctgtctgagttggccgaccccaaccccaaggtcatcaagcggatcagcgggggcagtggcagtggctccagccctttcctggacctgactcccgagcctggggctgccgtctacaagcacggggccctggtgcgaaaggtgcacgcagaccctgactgcaggaagacacctcggggcaagcggggctggaagagcttccacgggatcctcaagggcatgatcctctacctgcagaaggaggagtacaagcctgggaaggccctttcagagacggagctcaagaatgccatcagcatccaccatgccctggccactcgtgccagtgactacagcaagaggccccacgtcttctacctgcgcacagctgactggcgggtcttcctcttccaggccccgagcctggagcagatgcagtcctggatcactcgcatcaatgtagtagccgctatgttctctgcgccccccttcccagctgctgttagctcccaaaagaagttcagccgccctctcctgcccagcgctgccacccgcctctcccaggaggagcaggtgcggacccacgaggccaagctgaaggccatggcaagtgagctgcgggagcaccgggccgcccagctgggcaagaagggccggggcaaggaggctgaagagcagcggcagaaggaggcctacctggagtttgagaaatcccgctacagcacctatgcagcgctgcttcgggtcaagctgaaggcaggcagtgaggagctggatgcagtggaggcagcactggcccaggccgggagcacagaggatggactccctccttctcactccagtccctccctgcagcccaaaccctccagccagccccgggctcagcgtcacagctcagagcctcggccaggggcaggcagtgggcggcggaagccctgagatgaggtttagggtggggagtgcctgctgggcacctgaaggatgacatggccctgcctgagcccgggccggcctcgggccacccacgagggcctcccggcctagggcccgaccgcgccggacgcggtgtccggggcagggcagggctggggcctgggcctcaggagcctaggctaggggcacctccgagagcccctttttgtgataatgttttgcactttttcgtacagggtgggcgggggcgggaggggctagcgcccctgaacttttgatgctttttttttgtgtgggagaggcctgatgccgtttctgctttctgctgagaccacccccaccctgacaccatcagtccccctctgtcctggggcctggcttggacagagaccaggatttggggctgagctggtttcccctccttcctccccaagggcttactctttctcttgctggaggtggaggaagggcgtccatgccaaggccccatacctgggccgggggcagcacggcctggctttcccccgcttcagtgggccttgccctttgtacagcctccacccccattaaaactgctctggacttgc

SEQ ID NO: 44 - DNA, 3348 bp, Homo sapiens
atggctggggctggcgggggcctcggggtctgggggaacctggtgctgctgggcctgtgcagctggacaggggccagggcgcctgcccccaacccagggaggaacctgacagtggagactcagaccaccagctccatctccctgagctgggaggtccccgatggcctagactcacagaactccaactactgggttcagtgtactggagacggcggcacaacagagactcgaaacacaacagccaccaacgtcaccgtggatggccttggacccgggtcattgtatacgtgttctgtgtgggtggagaaagacggagtaaatagctctgtggggactgtcactactgccacagctcccaacccagtgaggaacctgagagtggaggctcagaccaacagctccatcgccctgacctgggaggtccccgacggcccagacccacagaactccacctacggggttgagtacactggagatggtggcagagcagggactcgaagcacagcacacactaacatcaccgtggatggacttgaacccgggtgtttgtatgcgttttccatgtgggtgggaaagaatggaatcaacagctcccgggagactcgaaatgccaccacagctcacaacccagtgaggaacctgagagtggaggctcagaccaccagctccatctccctgagctgggaggtccccgatggcacagacccacagaactcgacctactgcgttcagtgcactggagatggtggcagaacagagactcgaaacacaacagacaccagagtcaccgtggatggccttggacccgggtcattgtatacgtgttctgtgtgggtggagaaagacggagtaaatagctctgtggagattgtcactagtgccacagctcccaacccagtgagaaacctgacagtggaggctcagaccaacagctccatcgccctgacctgggaggtccccgatggcccagacccacagaactccacctacggggttgagtacactggagatggtggcagagcagggactcgaagcacagcacacaccaacatcaccgtggatagacttgaacccgggtgtttgtatgtgttttccgtgtgggtggggaagaatggaatcaacagctcccgggagactcgaaatgccaccacagcccccaacccagtgagaaacctccatatggagactcagaccaacagctccatcgccctatgctgggaagtccccgatggcccataccctcaggactacacctactgggtagagtacactggagacggtggtggcacagagacccgaaacacaacaaataccagtgtgacagctgagagacttgagcccggaaccttgtacacattctctgtatgggcagaaaaaaatggagcacgtggctccaggcagaatgtcagcatctccacagtccccaacgcagtgacaagcctcagcaagcaggactggaccaacagcaccattgctttgcgctggacagctccccagggcccaggccagtcttcctacagctactgggtctcatgggtcagggaaggcatgactgaccccaggacccaaagcacctcaggtactgacatcaccctaaaggaactggaagctggcagcctgtaccacctcaccgtctgggccgagaggaatgaggtcagaggctataacagcaccctcactgcagccactgctcccaatgaggtcacagatctccagaatgaaactcagactaagaactcagtcatgctgtggtggaaggcccctggagacccccactctcagttgtacgtatactgggtccagtgggccagcaagggacatccccggagggggcaagatccccaagcgaattgggtcaaccagaccagcaggaccaatgagacgtggtacaaagtggaggccctggaacccgggacgttgtacaatttcaccgtgtgggcagagaggaatgacgtagccagttccacgcagagcctctgtgcgtccacatacccagacacagtcaccatcacttcctgtgtcagcacctcagcgggctatggagtcaacttgatctggtcctgcccccagggaggctacgaggcctttgagttggaggtgggaggacagcggggctcccaggacagatcttcatgtggggaggctgtgtctgtgttgggtctcgggccggctcggtcctacccagccaccatcacgaccatctgggacggaatgaaggtcgtgtctcactctgtggtctgccacaccgagagtgcaggggtcattgccggagcctttgtgggcatcctcctgtttctcatcctcgtgggcctgctgattttcttcctgaagaggaggaataagaagaagcagcagaaaccagaactcagggatctggtctttagctccccaggggacatcccagctgaagacttcgctgaccacgtcaggaagaatgagagggacagcaactgtggttttgcagacaagtaccagcaactctccctggtgggccacagccagtctcagatggtggcttcggcttcagagaacaacgccaagaaccgctacagaaatgtgctgccctatgactggtcccgggtgcccctgaagcccatccatgaggagccaggctctgactacatcaatgccagcttcatgcccggtctctggagcccccaggagttcattgcaacccagggtcccctgccacagacagtgggtgacttctggcgcctggtgtgggaacagcagagccacaccctggtcatgctgaccaactgcatggaggccggccgggtgaagtgtgagcattactggcctctggactcgcagccctgcacccatgggcacctgcgggtaaccctggtaggtgaggaagtgatggagaactggacggtgcgggaactgctgctcctccaggtggaggagcagaagacactgtctgtgcgccaattccactaccaggcctggccggatcacggcgttccctcctccccagacaccttgctggctttctggaggatgcttcggcagtggctggatcagaccatggagggaggcccacccattgtgcactgcagtgctggcgtgggtcgcacaggaaccctcattgccctggacgtcctgctccggcagctgcagtccgagggtctccttgggcccttcagctttgtaaggaagatgagagagagtcggccgttgatggtgcagactgaggctcagtacgtattcctgcatcagtgcatcctgcggttcctccaacagtcagcccaggccccagccgagaaggaagtcccgtatgaggatgtcgaaaacctcatctacgagaacgtggccgccatccaggcccacaagttggaggtctaa

SEQ ID NO: 45 - DNA, 681 bp, Homo sapiens
actcaccactcgcctccacagatggcctctgcccaagatgccaggtacggccagaaagactcctctgatcagaactttgactacatgttcaaattactcatcatcggcaatagcagtgtggggaaaacatcttttctattccgttatgcagatgactcctttacatctgcattcgtcagcacagttgggatcgatttcaaagtaaaaactgtattcaaaaatgaaaagagaatcaagcttcagatttgggacacagcaggccaggaaagatacaggactatcaccacagcctattatcgtggagccatgggctttattttaatgtatgacattacaaatgaagaatccttcaatgcagtacaagattggtcaactcaaatcaaaacatactcttgggacaatgcccaagttattctggttgggaacaagtgtgacatggaagacgagcgggtcatctcaactgagcgaggtcaacatttaggagaacagcttgggtttgagttttttgaaacaagtgccaaggacaacattaatgtcaagcagacatttgagcgccttgtggatatcatctgcgacaaaatgtcagagagtttggagactgatcctgccatcactgctgcaaagcagaacacgagactcaaggaaactcctcctccaccgcagcccaactgtgcctgctag

SEQ ID NO: 46 - DNA, 2599 bp, Homo sapiens
gagctccgcccctcgcccggctcagctctcccggtatctggggctttgagcgtcccgggttgggcagggaactggcagcatagctcctaggatgcgagggccatttgtctccggccgggggtcagatcctcgggaagccgagccatcccatccagccgcttgccccaaaccgggcgcaggccgtggtcacttctctaggaagctccgaagatcccgccactccgtccctcaaaggtgcggaaagccggcttcccccagccctcggagaagattcctgactctccgctcggtcggggcatctgagggcaggagctgcgccaggcgtaccggatagaccagtggacaacacccacgccggaccgcctgtcccctacccggacccagactcggcgccgcacattgccccgggggggcccggcgcagtcacgcgcgcgcagagctcacgctctccgccccgcacacctgcgctccgccccctggtcctgggcccgcgacgggtgaaggcatttgggaagccagggcggctgcggaggcgatctccctgacccagggccggagttgcccggagcctgccaccgctctcagccagcccgcatccttctctgttcttccctccccccgcctgccacggcgcgggtatccgcagccacagcccggggccggtgaggcggcgaagggggaggggaggaatcaagggatgagcgccggaagggcgtcgggggccctgagccgcactaggacgcccctggagccggaaccccagcagaagccggaaccagaaccaaatcaccggtaccgggtcggccaggtggtcagggtgggagaaaccaaaaagggagaggggtgcgggagtactgagaggaaggggctgcagaggcctggctcaggccggcgtggaggaggtgcgggcgctgactcaggcaggatttctgctcccgccgcctaagaatgccgtcccatctcgtgctgcagtgtccttgggagggacagaagcgcgaacaagctggaaaggggaacgctcggggcgtcggggaagcgggaccagggtcgtggtagagagcttgcgttgccgctgacctcttgccgaaaggcgaaacagcactcctggcccggacagctccctggttgggtagggggtggggccggacctcagccggacgtcttagacgtgcttgtttcagatcctgaggacggcattcctacccctcccccattcccagctgcagccccctaaacccaggaggcgccctggcccgcgctcgccccccagggcctcatgtcggaaccacagcctgacctggaaccgccccaacatgggctatatatgctcttcctgcttgtgctggtcttcttcctcatgggcctggtaggcttcatgatctgccacgtgctcaagaagaagggctaccgctgccgcacgtcgaggggctctgagcctgacgatgcccagcttcagccccctgaggacgatgacatgaatgaggacacagtagagaggattgttcgctgcatcatccagaatgaagccaatgctgaggccttgaaggagatgctgggggacagtgaaggagaagggacagtgcagctgtccagtgtggatgccacctccagcctgcaggacggagccccctcccatcatcacacagtgcacctgggctctgcagccccttgcctccattgcagccgcagcaagaggcctccacttgtccgtcagggacgctccaaggaaggaaaaagccgcccccggacaggggagaccactgtgttctctgtgggcaggttccgggtgacacacattgagaagcgctatggactgcacgaacaccgtgatggctcccccacagacaggagctggggctctggtgggggacaggacccagggggtggtcaggggtctgggggagggcagcccaaggcagggatgcctgccatggagaggctgccccctgagaggccacagccccaggtcctagccagccccccagtacagaatggaggactcagggacagcagcctaacccctcgtgcacttgaagggaaccccagagcttctgcagagccaacactgagggccggagggaggggcccaagcccagggctgcccactcaagaggcaaatgggcagccaagcaaaccagacacttctgatcaccaggtgtctctaccacagggagcagggagtatgtgagtctccttcattgtgctgatggactaccagctggcagggccagggggtgggtgggcgtgaaagccctcccctccactggacagcactgccccccagctgagggaccagctctacttccacctggagttgcacagtctcaggctgggggcctcaggagaggtcacagcccctcagtctcttctccttcccctgcctgcaacaggctgcctgccccgccttccccaacacctcgctccatatgatagagcgtggcagctgggagcaggcccctgcccgtggtgggcccctaaagcaatagcaccgtaggccccctgccctcttagcacaagaggcccaggccctggcctggccttcgtgccctttattcattgtcaataaatccgctcagaccattaaaaaaaaaaaaaaaaa

SEQ ID NO: 47 - DNA, 387 bp, Homo sapiens
atggagaacgcgggaggcgcagagggtacagagagtggagctgcggcgtgcgcggccaccgacggccctacgcggcgcgcgggcgcggactccggatacgcaggcttctggagaccctgggtggacgccggaggcaagaaagaagaggagacgccgaaccacgccgcggaggcgatgcccgatggccctggaatgaccgcagcctcaggaaagctttaccaattcaggcacccagtcagactattttggccaaaatcaaaatgttatgattacttatatcaagaagcagaagctcttctgaaaaattttccaattcaagccacaatttcattttatgaagattctgatagcgaagatgaaattgaggatctgacctgtgaaaattaa

SEQ ID NO: 48 - DNA, 786 bp, Homo sapiens
atggacgaagccctagaaacgcagctgaagacgagcagaggacgcttctcggctacagaatccctccccaccttggagctcttatctcaggtggacatggactgcagggtccacatgcgacccatcggcctgacgtgggtgctgcaactgaccttggcatggatcctgctagaagcctgtggagggagccgcccactccaagccaggtcccagcaacaccatgggctggcagctgatctgggcaaaggcaagctgcacctggcaggaccttgttgtccctcagagatggacacaacagagacatcgggccctggaaaccatccagaacgctgtggagtgccgagccctgaatgcgaatccttcctggaacacctccaacgtgcccttcgcagtcgcttccgcctgcggctattgggggtacgccaggcacagccgctctgcgaggagctctgccaggcctggttcgccaactgcgaagatgatatcacctgcggcccgacttggctcccactctcagaaaaaaggggctgtgagcccagctgccttacctatggacagaccttcgcagacgggacggacctttgtcgctcggctctgggccacgccctaccggtggctgctcctggagcccgtcactgcttcaacatctccatctccgcggtacctcgtcccagaccaggacgacggggccgggaagctccctcccggcgttcccgcagccctcgcacctccatcctggacgctgcgggcagcgggagtggcagtggaagcggcagcggcccctag

SEQ ID NO: 49 - DNA, 1275 bp, Homo sapiens
atgagcgtgggctgcccagagcctgagccgccccgctccctgacctgctgtgggccggggactgcccctgggcctggtgccggtgtgccccttctcactgaagacatgcaggccctgactctccgcacactggccgccagcgacgtcaccaagcactacgaactagtccgggagctgggcaaaggcacctatgggaaggttgacctggtggtctacaagggcacaggcacaaaaatggcactgaagtttgtgaacaagagcaaaaccaagctgaagaacttcctacgggaggtgagcatcaccaacagcctctcctccagccccttcatcatcaaggtctttgacgtggtctttgagacagaggactgctacgtctttgcccaggagtacgcacctgctggggacctgtttgacatcatccctccccaggtggggctccctgaggacacggtgaagcgctgtgtgcagcagctgggcctggcgctggacttcatgcacgggcggcagctggtgcaccgcgacatcaagcccgagaacgtgctgctgttcgaccgcgagtgccgccgcgtaaagctggccgacttcggcatgacgcgccgcgtgggctgccgcgtcaagcgcgtgagcggcaccatcccttacacggcgcctgaggtgtgccaggcgggccgcgccgacgggctggcggtggacacgggcgtggacgtgtgggccttcggcgtgctcatcttctgcgtgctcaccggcaacttcccgtgggaggcggcgtcgggcgccgacgccttcttcgaggagttcgtgcgctggcagcggggccgcctgccggggctgccttcgcagtggcgccgcttcaccgagcccgcgctgcgcatgttccagcgcttactggccctggagcccgagcgccgcggcccagccaaggaggtgttccgcttcctcaagcacgagctcacgtccgagctgcgccgccggccctcgcaccgcgcgcgcaagccccccggggaccgcccgcccgccgccgggccactgcgcctcgaggcgcctgggccgctcaagcggacggtgctgaccgagagcggcagcggctcccggcccgcgccccccgccgtcgggtcggtgcccttgcccgtgccggtgccggtgccagtgcccgtgccggtgcctgtgcccgagcccggcctagctccccaggggccccccggccggaccgacggccgcgcggacaagagcaaagggcaggtggtgctggccacggccatcgagatctgcgtctga

SEQ ID NO: 50 - DNA, 5943 bp, Homo sapiens
atggcagcgcggctgcttgcaccaccaggccctgatagtttcaagcctttcacccctgagtcactggcaaacattgagaggcgcattgctgagagcaagctcaagaaaccaccaaaggccgatggcagtcatcgggaggacgatgaggacagcaagcccaagccaaacagcgacctggaagcagggaagagtttgcctttcatctacggggacatcccccaaggcctggttgcagttcccctggaggactttgacccatactatttgacgcagaaaacctttgtagtattaaacagagggaaaactctcttcagatttagtgccacgcctgccttgtacattttaagtccttttaacctgataagaagaatagctattaaaattttgatacattcagtatttagcatgatcattatgtgcactattttgaccaactgtgtattcatgacttttagtaaccctcctgactggtcgaagaatgtggagtacacgttcacagggatttatacatttgaatcactagtgaaaatcattgcaagaggtttctgcatagatggctttacctttttacgggacccatggaactggttagatttcagtgtcatcatgatggcgtatataacagagtttgtaaacctaggcaatgtttcagctctacgcactttcagggtactgagggctttgaaaactatttcggtaatcccaggcctgaagacaattgtgggtgccctgattcagtctgtgaagaaactgtcagatgtgatgatcctgacagtgttctgcctgagtgtttttgccttgatcggactgcagctgttcatggggaaccttcgaaacaagtgtgttgtgtggcccataaacttcaacgagagctatcttgaaaatggcaccaaaggctttgattgggaagagtatatcaacaataaaacaaatttctacacagttcctggcatgctggaacctttactctgtgggaacagttctgatgctgggcaatgcccagagggataccagtgtatgaaagcaggaaggaaccccaactatggttacacaagttttgacacttttagctgggccttcttggcattatttcgccttatgacccaggactattgggaaaacttgtatcaattgactttacgagcagccgggaaaacatacatgatcttcttcgtcttggtcatctttgtgggttctttctatctggtgaacttgatcttggctgtggtggccatggcttatgaagaacagaatcaggcaacactggaggaggcagaacaaaaagaggctgaatttaaagcaatgttggagcaacttaagaagcaacaggaagaggcacaggctgctgcgatggccacttcagcaggaactgtctcagaagatgccatagaggaagaaggtgaagaaggagggggctcccctcggagctcttctgaaatctctaaactcagctcaaagagtgcaaaggaaagacgtaacaggagaaagaagaggaagcaaaaggaactctctgaaggagaggagaaaggggatcccgagaaggtgtttaagtcagagtcagaagatggcatgagaaggaaggcctttcggctgccagacaacagaatagggaggaaattttccatcatgaatcagtcactgctcagcatcccaggctcgcccttcctctcccgccacaacagcaagagcagcatcttcagtttcaggggacctgggcggttccgagacccgggctccgagaatgagttcgcggatgacgagcacagcacggtggaggagagcgagggccgccgggactccctcttcatccccatccgggcccgcgagcgccggagcagctacagcggctacagcggctacagccagggcagccgctcctcgcgcatcttccccagcctgcggcgcagcgtgaagcgcaacagcacggtggactgcaacggcgtggtgtccctcatcggcggccccggctcccacatcggcgggcgtctcctgccagaggctacaactgaggtggaaattaagaagaaaggccctggatctcttttagtttccatggaccaattagcctcctacgggcggaaggacagaatcaacagtataatgagtgttgttacaaatacactagtagaagaactggaagagtctcagagaaagtgcccgccatgctggtataaatttgccaacactttcctcatctgggagtgccacccctactggataaaactgaaagagattgtgaacttgatagttatggacccttttgtggatttagccatcaccatctgcatcgtcctgaatacactgtttatggcaatggagcaccatcctatgacaccacaatttgaacatgtcttggctgtaggaaatctggttttcactggaattttcacagcggaaatgttcctgaagctcatagccatggatccctactattatttccaagaaggttggaacatttttgacggatttattgtctccctcagtttaatggaactgagtctagcagacgtggaggggctttcagtgctgcgatctttccgattgctccgagtcttcaaattggccaaatcctggcccaccctgaacatgctaatcaagattattggaaattcagtgggtgccctgggcaacctgacactggtgctggccattattgtcttcatctttgccgtggtggggatgcaactctttggaaaaagctacaaagagtgtgtctgcaagatcaaccaggactgtgaactccctcgctggcatatgcatgactttttccattccttcctcattgtctttcgagtgttgtgcggggagtggattgagaccatgtgggactgcatggaagtggcaggccaggccatgtgcctcattgtctttatgatggtcatggtgattggcaacttggtggtgctgaacctgtttctggccttgctcctgagctccttcagtgcagacaacctggctgccacagatgacgatggggaaatgaacaacctccagatctcagtgatccgtatcaagaagggtgtggcctggaccaaactaaaggtgcacgccttcatgcaggcccactttaagcagcgtgaggctgatgaggtgaagcctctggatgagttgtatgaaaagaaggccaactgtatcgccaatcacaccggtgcagacatccaccggaatggtgacttccagaagaatggcaatggcacaaccagcggcattggcagcagcgtggagaagtacatcattgatgaggaccacatgtccttcatcaacaaccccaacttgactgtacgggtacccattgctgtgggcgagtctgactttgagaacctcaacacagaggatgttagcagcgagtcggatcctgaaggcagcaaagataaactagatgacaccagctcctctgaaggaagcaccattgatatcaaaccagaagtagaagaggtccctgtggaacagcctgaggaatacttggatccagatgcctgcttcacagaaggttgtgtccagcggttcaagtgctgccaggtcaacatcgaggaagggctaggcaagtcttggtggatcctgcggaaaacctgcttcctcatcgtggagcacaactggtttgagaccttcatcatcttcatgattctgctgagcagtggcgccctggccttcgaggacatctacattgagcagagaaagaccatccgcaccatcctggaatatgctgacaaagtcttcacctatatcttcatcctggagatgttgctcaagtggacagcctatggcttcgtcaagttcttcaccaatgcctggtgttggctggacttcctcattgtggctgtctctttagtcagccttatagctaatgccctgggctactcggaactaggtgccataaagtcccttaggaccctaagagctttgagacccttaagagccttatcacgatttgaagggatgagggtggtggtgaatgccttggtgggcgccatcccctccatcatgaatgtgctgctggtgtgtctcatcttctggctgattttcagcatcatgggagttaacttgtttgcgggaaagtaccactactgctttaatgagacttctgaaatccgatttgaaattgaagatgtcaacaataaaactgaatgtgaaaagcttatggaggggaacaatacagagatcagatggaagaacgtgaagatcaactttgacaatgttggggcaggatacctggcccttcttcaagtagcaaccttcaaaggctggatggacatcatgtatgcagctgtagattcccggaagcctgatgagcagcctaagtatgaggacaatatctacatgtacatctattttgtcatcttcatcatcttcggctccttcttcaccctgaacctgttcattggtgtcatcattgataacttcaatcaacaaaagaaaaagttcggaggtcaggacatcttcatgaccgaagaacagaagaagtactacaatgccatgaaaaagctgggctcaaagaagccacagaaacctattccccgccccttgaacaaaatccaaggaatcgtctttgattttgtcactcagcaagcctttgacattgttatcatgatgctcatctgccttaacatggtgacaatgatggtggagacagacactcaaagcaagcagatggagaacatcctctactggattaacctggtgtttgttatcttcttcacctgtgagtgtgtgctcaaaatgtttgcgttgaggcactactacttcaccattggctggaacatcttcgacttcgtggtagtcatcctctccattgtgggaatgttcctggcagatataattgagaaatactttgtttccccaaccctattccgagtcatccgattggcccgtattgggcgcatcttgcgtctgatcaaaggcgccaaagggattcgtaccctgctctttgccttaatgatgtccttgcctgccctgttcaacatcggccttctgctcttcctggtcatgttcatcttctccatttttgggatgtccaattttgcatatgtgaagcacgaggctggtatcgatgacatgttcaactttgagacatttggcaacagcatgatctgcctgtttcaaatcacaacctcagctggttgggatggcctgctgctgcccatcctaaaccgcccccctgactgcagcctagataaggaacacccagggagtggctttaagggagattgtgggaacccctcagtgggcatcttcttctttgtaagctacatcatcatctctttcctaattgtcgtgaacatgtacattgccatcatcctggagaacttcagtgtagccacagaggaaagtgcagaccctctgagtgaggatgactttgagaccttctatgagatctgggagaagttcgaccccgatgccacccagttcattgagtactgtaagctggcagactttgcagatgccttggagcatcctctccgagtgcccaagcccaataccattgagctcatcgctatggatctgccaatggtgagcggggatcgcatccactgcttggacatcctttttgccttcaccaagcgggtcctgggagatagcggggagttggacatcctgcggcagcagatggaagagcggttcgtggcatccaatccttccaaagtgtcttacgagccaatcacaaccacactgcgtcgcaagcaggaggaggtatctgcagtggtcctgcagcgtgcctaccggggacatttggcaaggcggggcttcatctgcaaaaagacaacttctaataagctggagaatggaggcacacaccgggagaaaaaagagagcaccccatctacagcctccctcccgtcctatgacagtgtaactaaacctgaaaaggagaaacagcagcgggcagaggaaggaagaagggaaagagccaaaagacaaaaagaggtcagagaatccaagtgttag

SEQ ID NO: 51 - DNA, 1932 bp, Homo sapiens
atggaggccgtggagaccggggaacggcccaccttcggagcctgggactacggggtctttgccctcatgctcctggtgtccactggcatcgggctgtgggtcgggctggctcggggcgggcagcgcagcgctgaggacttcttcaccgggggccggcgcctggcggccctgcccgtgggcctgtcgctgtctgccagcttcatgtcggccgtgcaggtgctgggcgtgccgtcggaggcctatcgctatggcctcaagttcctctggatgtgcctgggccagcttctgaactcggtcctcaccgccctgctcttcatgcccgtcttctaccgcctgggcctcaccagcacctacgagtacctggagatgcgcttcagccgcgcagtgcggctctgcgggactttgcagtacattgtagccacgatgctgtacaccggcatcgtaatctacgcaccggccctcatcctgaaccaagtgaccgggctggacatctgggcgtcgctcctgtccaccggaattatctgcaccttctacacggctgtgggcggcatgaaggctgtggtctggactgatgtgttccaggtcgtggtgatgctaagtggcttctgggttgtcctggcacgcggtgtcatgcttgtgggcgggccccgccaggtgctcacgctggcccagaaccactcccggatcaacctcatggactttaaccctgacccgaggagccgctatacattctggacttttgtggtgggtggcacgttggtgtggctctccatgtatggcgtgaaccaggcgcaggtgcagcgctacgtggcttgccgcacagagaagcaggccaagctggccctgctcatcaaccaggtcggcctgttcctgatcgtgtccagcgctgcctgctgtggcatcgtcatgtttgtgttctacactgactgcgaccctctcctcctggggcgcatctctgccccagaccagtacatgcctctgctggtgctggacatcttcgaagatctgcctggagtccccgggcttttcctggcctgtgcttacagtggcaccctcagcacagcatccaccagcatcaatgctatggctgcagtcactgtagaagacctcatcaaacctcggctgcggagcctggcacccaggaaactcgtgattatctccaaggggctctcactcatctacggatcggcctgtctcaccgtggcagccctgtcctcactgctcggaggaggtgtccttcagggctccttcaccgtcatgggagtcatcagcggccccctgctgggagccttcatcttgggaatgttcctgccggcctgcaacacaccgggcgtcctcgcgggactaggcgcgggcttggcgctgtcgctgtgggtggccttgggcgccacgctgtacccacccagcgagcagaccatgagggtcctgccatcgtcggctgcccgctgcgtggctctctcagtcaacgcctctggcctcctggacccggctctcctccctgctaacgactccagcagggcccccagctcaggaatggacgccagccgacccgccttagctgacagcttctatgccatctcctatctctattacggtgccctgggcacgctgaccactgtgctgtgcggagccctcatcagctgcctgacaggccccaccaagcgcagcaccctggccccgggattgttgtggtgggacctcgcacggcagacagcatcagtggcccccaaggaagaagtggccatcctggatgacaacttggtcaagggtcctgaagaactccccactggaaacaagaagccccctggcttcctgcccaccaatgaggatcgtctgtttttcttggggcagaaggagctggagggggctggctcttggaccccctgtgttggacatgatggtggtcgagaccagcaggagacaaacctctga

SEQ ID NO: 52 - DNA, 2184 bp, Homo sapiens
atgccgaagaacagcaaagtgacccagcgtgagcacagcagtgagcatgtcactgagtccgtggccgacctgctggccctcgaggagcctgtggactataagcagagtgtactgaatgtggctggtgaggcaggcggcaagcagaaggcggtggaggaggagctggatgcagaggaccggccggcctggaacagtaagctgcagtacatcctggcccagattggcttctctgtgggcctcggcaacatctggaggttcccctacctgtgccagaaaaatggaggaggtgcttacctggtgccctacctggtgctgctgatcatcatcgggatccccctcttcttcctggagctggctgtgggtcagaggatccgccgcggcagcatcggtgtgtggcactatatatgtccccgcctggggggcatcggcttctccagctgcatagtctgtctctttgtggggctgtattataatgtgatcatcgggtggagcatcttctatttcttcaagtccttccagtacccgctgccctggagtgaatgtcctgtcgtcaggaatgggagcgtggcagtggtggaggcagagtgtgaaaagagctcagccactacctacttctggtaccgagaggccttggacatctctgactccatctcggagagtgggggcctcaactggaagatgaccctgtgcctcctcgtggcctggagcatcgtggggatggctgtcgttaagggcatccagtcctcggggaaggtgatgtatttcagctccctcttcccctacgtggtgctggcctgcttcctggtccgggggctgttgctgcgaggggcagttgatggcatcctacacatgttcactcccaagctggacaagatgctggacccccaggtgtggcgggaggcagctacccaggtcttctttgccttgggcctgggctttggtggtgtcattgccttctccagctacaataagcaggacaacaactgccacttcgatgccgccctggtgtccttcatcaacttcttcacgtcagtgttggccaccctcgtggtgtttgctgtgctgggcttcaaggccaacatcatgaatgagaagtgtgtggtcgagaatgctgagaaaatcctagggtaccttaacaccaacgtcctgagccgggacctcatcccaccccacgtcaacttctcccacctgaccacaaaggactacatggagatgtacaatgtcatcatgaccgtgaaggaggaccagttctcagccctgggccttgacccctgccttctggaggacgagctggacaagtccgtgcagggcacaggcctggccttcatcgccttcactgaggccatgacgcacttccccgcctccccgttctggtccgtcatgttcttcttgatgcttatcaacctgggcctgggcagcatgatcgggaccatggcaggcatcaccacgcccatcatcgacaccttcaaggtgcccaaggagatgttcacagtgggctgctgtgtctttgcattcctcgtggggctgttgttcgtccagcgctccggaaactactttgtcaccatgttcgatgactactcggccaccctgccactcactctcatcgtcatccttgagaacatcgctgtggcctggatttatggaaccaagaagttcatgcaggagctgacggagatgctgggcttccgcccctaccgcttctatttctacatgtggaagttcgtgtctccactatgcatggctgtgctcaccacagccagcatcatccagctgggggtcacgcccccgggctacagcgcctggatcaaggaggaggctgccgagcgctacctgtatttccccaactgggccatggcactcctgatcaccctcatcgtcgtggcgacgctgcccatccctgtggtgttcgtcctgcggcacttccacctgctctctgatggctccaacaccctctccgtgtcctacaagaagggccgcatgatgaaggacatctccaacctggaggagaacgatgagacccgcttcatcctcagcaaggtgcccagtgaggcaccttcccccatgcccactcaccgttcctatctggggcccggcagcacatcacccctggagaccagcggtaaccccaatggacgctatgggagcggctacctgctggccagcacccctgagtcggagctgtga

SEQ ID NO: 53 - DNA, 2766 bp, Homo sapiens
atggctcccctggccttggtgggggtcacactcctcctggcggctcccccatgctccggggcagccaccccaaccccctccctgccgcctcccccggccaatgacagcgacaccagcacagggggctgccaggggtcctaccgctgccagccgggggtgctgctgcccgtgtgggagcccgacgacccgtcgctgggtgacaaggcggcacgggcagtggtgtactttgtggccatggtctacatgtttctgggagtgtccatcatcgccgaccgtttcatggcggccatcgaggtcatcacgtcaaaagagaaggagatcaccatcaccaaggccaacggtgagaccagcgtgggcaccgttcgcatctggaatgagacggtgtccaacctcacgctcatggccctgggctcctccgcacctgagatcctgctgtcagtcatcgaagtctgcggccacaacttccaggcgggtgagctgggcccaggcaccatcgtgggcagcgctgccttcaacatgtttgtggtcatcgccgtgtgcatctacgtcatcccagccggcgagagccgcaagatcaagcacctgagagtcttctttgtcactgcctcttggagcatcttcgcctatgtctggctttatctcatccttgctgttttttcccccggtgtggtccaggtgtgggaggcgctgctgaccctggtcttcttcccggtgtgcgtggtattcgcctggatggccgacaagcggctgctcttctacaagtacgtgtacaagcgctaccgcaccgacccacgcagcggcatcatcataggcgccgagggcgaccccccgaagagcatcgagctggacggcacgttcgtgggcgccgaggccccaggtgagctgggcggcctgggcccgggccccgccgaggcgcgcgagctggacgccagccgccgcgaggtcatccagatcctcaaggacctcaagcagaagcacccggacaaggatctggagcagctggtgggcatcgccaactactacgcgctgctgcaccagcagaagagccgcgccttctaccgcatccaggccacgcggctgatgaccggcgccgggaacgtgctgcgcagacacgcggcggacgcctcgcgcagggcggcgccggccgagggcgcgggcgaggacgaagacgacggcgccagccgcatcttcttcgagcctagcctctaccactgcctggagaactgcggctccgtgctgctgtccgtcacgtgccagggcggcgagggcaacagcaccttctacgtggactaccgcactgaggacggctctgccaaggcgggctccgactacgagtacagcgagggcacgctggtgttcaaaccaggcgagacgcagaaggagctgcgcatcggcatcatcgacgacgacatcttcgaggaggacgagcatttcttcgtgcggctgctgaacctgcgcgtgggcgacgcgcagggcatgttcgagccggacggcggcgggcggcccaaggggcggctggtggcgccgctgctggccaccgtcaccatcctggacgacgaccacgcaggcatcttctccttccaggaccgcctgctgcacgtgagcgagtgcatgggcaccgtggacgtgcgcgtcgtgcgcagctcgggcgcgcgcggcaccgtgcgccttccctaccgcacggtggacggcacggcgcgcggcggcggcgtgcactacgaggacgcgtgcggagagctggagtttggcgacgacgagaccatgaaaactcttcaggtgaagatagttgatgacgaggaatatgagaaaaaggataatttcttcattgagctgggccagccccagtggcttaagcgagggatttcagctctgctactcaatcaaggggatggggacaggaagctaacagccgaggaggaggaggctcggaggatagcagagatgggcaagccagttcttggggagaactgccggctggaggtcatcatcgaggagtcatatgattttaagaacacggtggataaactcatcaagaaaacgaacttggccttggtaattgggacccattcatggagggagcagtttttagaggcaattacggtgagcgcaggggacgaggaggaggaggaggacgggtcccgggaggagcggctgccgtcgtgctttgactacgtgatgcacttcctgacggtgttctggaaggtgctcttcgcctgtgtgccccccaccgagtactgccacggctgggcctgctttggtgtctccatcctggtcatcggcctgctcaccgccctcattggggacctcgcctcccacttcggctgcaccgttggcctcaaggactctgtcaatgctgttgtcttcgttgccctgggcacctccatccctgacacgttcgccagcaaggtggcggcgctgcaggaccagtgcgccgacgcgtccatcggcaacgtgaccggctccaacgcggtgaacgtgttccttggcctgggcgtcgcctggtctgtggccgccgtgtactgggcggtgcagggccgccccttcgaggtgcgcactggcacgctggccttctccgtcacgctcttcaccgtcttcgccttcgtgggcattgccgtgctgctgtaccggcgccggccgcacatcggcggcgagctgggcggcccgcgcggacccaagctcgccaccaccgcgctcttcctgggcctctggctcctgtacatcctcttcgccagcctggaggcgtactgccacatccggggcttctag

SEQ ID NO: 54 - DNA, 1968 bp, Homo sapiens
atggttttgtacacgaccccctttcctaacagctgtctgtccgccctgcactgtgtgtcctgggcccttatctttccatgctactggctggtggaccggctcgctgcctccttcatacccaccacctacgagaagcgccagcgggcagacgacccgtgctgcctgcagctgctctgcactgccctcttcacgcccatctacctggccctcctggtggcctcgctgccctttgcgtttctcggctttctcttctggtccccactgcagtcggcccgccggccctacatctattcacggctggaagacaagggcctggccggtggggcagccctgctcagtgaatggaagggcacggggcctggcaaaagcttctgctttgccactgccaacgtctgcctcctgcccgactcactcgccagggtcaacaacctttttaacacccaagcgcgggccaaggagatcgggcagagaatccgcaatggggccgcccggccccagatcaaaatttacatcgactcccccaccaatacctccatcagcgccgctagcttcagcagcctggtgtcaccacagggcggcgatggggtggcccgggccgtccccgggagcattaagaggacagcctctgtggagtacaagggtgacggtgggcggcaccccggtgacgaggctgccaacggcccagcctctggggaccctgtcgacagcagcagcccggaggatgcctgcatcgtgcgcatcggtggcgaggagggcggccggccacctgaagctgacgaccctgtgcctgggggccaggccaggaacggagctggcgggggcccaaggggccagacgcccaaccataatcagcaggacggggattcagggagcctgggcagcccctcggcctcccgggagtccctggtgaaggggcgagctgggccagacaccagtgccagcggggagccaggtgccaacagcaagctcctgtacaaggcctcggtggtgaagaaggcggctgcacgcaggaggcggcaccccgacgaggccttcgaccatgaggtctccgccttcttccccgccaacctggacttcctgtgcctgcaggaggtgtttgacaagcgagcagccaccaaattgaaagagcagctgcacggctacttcgagtacatcctgtacgacgtcggggtctacggctgccagggctgctgcagcttcaagtgtctcaacagcggcctcctctttgccagccgctaccccatcatggacgtggcctatcactgttaccccaacaagtgtaacgacgatgccctggcctctaagggagctctgtttctcaaggtgcaggtgggaagcacacctcaggaccaaagaatcgtcgggtacatcgcctgcacacacctgcatgccccgcaagaggacagcgccatccggtgtgggcagctggacctgcttcaggactggctggctgatttccgaaaatctacctcctcgtccagcgcagccaaccccgaggagctggtggcatttgacgtcgtctgtggagatttcaactttgataactgctcctctgacgacaagctggagcagcaacactccctgttcacccactacagggacccctgccgcctggggcctggtgaggagaagccgtgggccatcggtactctgctggacacgaacggcctgtacgatgaggatgtgtgcacccccgacaacctgcagaaggtcctggagagtgaggagggccgcagggagtacctggcgtttcccaccagcaagagctcgggccagaaggggcggaaggagctgctgaagggcaacggccggcgcatcgactacatgctgcatgcagaggaggggctgtgcccagactggaaggccgaggtggaagaattcagttttatcacccagctgtccggcctgacggaccacctgccagtagccatgcgactgatggtgtcttcgggggaggaggaggcatag

SEQ ID NO: 55 - DNA, 6465 bp, Homo sapiens
atggcgcaggtaccaggggaagtggacaacatggagggcctgcctgctcctaacaacaaccctgctgcccgctgggagagtccggatcggggctgggagcgggagcagccggctgcgtccaccgcagcggcctcgctctttgagtgctcccggatcaaggccttggcagatgagcgggaagccgtgcagaagaaaaccttcaccaagtgggtgaactcgcacctcgcccgcgtgggctgccacatcggggacctctatgtggacctccgggacggcttcgtgctcacgcggctcctggaagtgctgtctggggagcagctgcccaggcccacgcgcggccgcatgcggatccactcactggagaacgtggacaaggcgctgcagtttctgaaggagcagcgcgtgcacctggagaacgtgggttcgcatgacatcgtggatgggaatcaccggctgacgctggggctggtctggaccatcatcctgcgcttccagattcaagtcatcaaaattgagactgaggacaacagagagacacgctcagccaaggatgctctgctcttgtggtgtcagatgaagacagctggttaccctgaggtaaacatccagaatttcaccaccagctggcgggatggcttggccttcaatgccctcattcaccggcacaggcctgatctcgtggacttcagcaaactcaccaagtccaatgccaactacaacctgcagagagccttccgcacagctgagcagcacctggggctggcgcggctgctggatcctgaagatgtgaacatggaggctccagatgagaagtccatcatcacctacgtggtctctttctaccactatttctccaagatgaaggctctggctgtggaggggaagcgtatcgggaaggtcttggaccaggtattggaggtggggaagatcatagaacgctacgaggagctggcggctgagctgctggcctggatccaccgcaccgtgggcctcatcagcaatcagaaatttgccaactccttaagtggggtgcagcagcaactccaggctttcacggcctattgcacgctggagaagcctgtcaagttccaggagaaggggaacctagaggtgctgctcttcagcatccagagcaaactgcgtgcctgcaaccgtcgcctctttgtgcctcgggagggctgtggcatctgggatattgacaaggcatggggtgagctggagaaggctgagcatgagcgggaggctgccctacgggctgagctgattcggcaggagaagctggaactactggcacagaggtttgaccacaaggtggctatgagggagagctggctgaatgagaaccagcgtctggtctcccaggacaactttgggtatgagctgcccgcagtggaggcagccatgaagaaacacgaagcgatcgaggcagacattgcggcctacgaggagcgggtgcagggtgtggcggagctggcccaggcattggcagccgaaggctactacgatatccggcgggtggcagcccagcgtgacagcgtcctgcgccagtgggccctgctaactgggcttgtgggtgcccggcggacacgacttgagcagaaccttgccctgcagaaggtcttccaggagatggtgtacatggtggactggatggaggagatgcaggctcagctgctgtcccgggagtgtgggcagcacctggtggaggcagacgacctgttgcagaagcatggactgctggagggagacattgccgcccagagcgagcgggtggaggctctcaatgccgctgccctgcgcttctcccagctgcagggctaccagccctgcgacccgcaggtcatctgcaaccgcgtgaaccacgtgcacggctgcctggcggagctgcaggagcaggcagcgcggcgacgcgcggagctggaggcttcgcggagcctgtgggcgctgctgcaggagctggaggaggccgagagctgggcgcgcgacaaggagcgtctcctggaggctgcgggcggcggcggtgcggcgggcgcagcgggcgcagcgggaacagcgggcggcgcgcatgacctgtccagcacagcgcgcctcctggcccagcacaagatcctgcagggcgagctgggcgggcggcgagcgttgctgcagcaggccctgcggtgtggcgaggagctggttgcggccggcggtgccgtcggcccgggagcagacaccgtgcacctggtaggcctggcggagcgcgcggcgagcgcccggcgccgctggcagaggctggaagaggcggcggcgcggcgagagcggcggctgcaggaggcgcgggcgctgcaccagttcggcgctgacctcgacgggctgctggactggcttcgcgacgcttaccgcctggcagccgccggtgacttcggccacgacgaagcttccagccgccgcctggcgcgccagcaccgcgcgctcaccggggaggtggaggcacatcgcgggcccgtgagcggcctgcggcgccagctggcgacactcgggggtgccagtggcgcagggccactggtggtggcgctgcaggtgcgcgtggtggaagcagagcagttgttcgctgaggtgaccgaagtggcggcgctgaggcgccagtggctgcgggacgcgctcgctgtctaccgcatgtttggcgaggtgcacgcgtgtgagctgtggatcggcgagaaggagcaatggctgctctccatgcgtgtgccggattcactcgacgacgtcgaggtggtgcagcaccgattcgagagcctggaccaagagatgaacagcctgatgggccgcgttctggacgtgaaccacacagtccaggagctggtggaaggaggccaccccagttcagatgaggtgcgttcctgccaggaccacctcaacagcaggtggaaccgcatcgtggagctagtggaacagcgcaaagaggaaatgagcgcggtgctgctggtggagaaccacgtgctggaggtggccgaggtgcgcgcccaggtgcgtgagaagcggagagctgtggagagcgcgccccgggccggcggcgccctgcagtggcgtcttagcggcctagaggccgctctgcaggcgctggagccgcgccaggcggcccttctggaggaggcagccctgctggctgagcgcttcccggcgcaggcggcgcggctgcaccagggcgcggaggagctgggcgccgagtggggcgcgctagctagcgcggctcaggcctgcggcgaggcggtggcggcagcagggcgcctgcagcgcttcctacatgacctcgacgctttcctggactggctcgtgcgcgcccaggaggcggcgggcggcagcgaggggcccctgcccaacagcctagaagaggcggacgcgctgctggcgcgccacgctgcgctcaaggaggaggtggaccagcgcgaggaagactatgctcgcatcgtggcggccagcgaggcgctgctggccgccgacggcgcagagctgggcccgggcctggcactagacgagtggctgccacacctcgaacttggctggcataaactgctcggcttgtgggaggcgcgcagggaggcgctggtccaggcgcacatctaccagctcttcctgcgggatctacgccaggcgctcgtggtgctgcgtaaccaggagatggcgctgtctggtgcggagctcccgggcacagtggaatcggtggaggaggccttgaaacagcaccgtgactttctcaccaccatggagctgagccagcaaaagatgcaggtggccgtgcaggctgcagagggcctgctgaggcagggcaacatctacggggagcaggctcaggaggctgtgacccggctgctggagaagaaccaagaaaaccagttacgggcccagcaatggatgcaaaagctacatgaccaacttgagctgcagcacttcctccgagactgccacgagctggatggctggatccatgagaagatgctgatggcgcgggatggcacgcgggaggacaaccacaagctgcataagagatggctccggcaccaggcattcatggccgagctggctcagaataaggagtggctggagaagatcgagcgggagggccagcaactgatgcaggagaagcccgaactggcggcctccgtgcggaagaagctgggcgagatccgccagtgctgggcggagctggagagcaccacccaggccaaggcacggcagctctttgaggccagcaaagcagaccagctggtgcagagctttgctgagctggacaagaagctccttcacatggagagccagctgcaagacgtggaccctggaggagacctggccactgtcaacagtcagctcaagaagctgcagtccatggagtcgcaggtggaggagtggtaccgcgaggtgggagagctgcaggcgcagacggcggcgctgccgctggagccggcgagcaaggagctggtgggtgagcggcagaacgcggtgggcgagcgcctggtgcgcctgctcgagccgttgcaggagcgccgccgcttgctgctggcttccaaggagttgcaccaggtggcgcacgacctggacgacgagctggcatgggttcaggagcggctgccactggccatgcagacagagcgaggcaacggtttgcaggcggtccagcagcacatcaaaaagaaccagggcctgcggcgggagatccaggcgcatgggccgcgcctggaggaggtgctggagcgcgcgggcgcgctggcgtcgctgcgcagcccggaggcagaggcagtgcgccggggcctggagcagctgcagagcgcctgggccggactgcgggaggctgccgagcgacggcagcaggtgctggacgccgccttccaggtggagcagtactacttcgacgtggctgaggtggaggcgtggctgggcgagcaggagctgctcatgatgagtgaggacaagggcaaggacgaacagagcaccctgcagctgctcaagaaacacctgcagctggagcaaggcgtggagaactacgaggaaagcatcgcgcagctgtcgcgccagtgccgggcgctgctggagatggggcacccggacagcgagcagatcagccggcggcagtctcaggtggaccgcctgtacgtggcgctcaaggagctgggtgaggagcgccgggtggctctggaacagcagtactggctgtaccagctcagccgccaggtgagcgagcttgagcactggattgccgagaaggaggtggtggctggctcacccgagctcggccaggactttgagcatgtctcggtgctgcaggagaaattctcagagtttgccagcgagacaggtatggcagggcgggaacggctggcagctgtgaaccagatggtggatgagctgatcgagtgtggccatacagcagcggccaccatggccgagtggaaggacggactgaacgaggcctgggctgagctgctggagctcatgggcacacgggcccagctgctggccgcctctcgggagcttcataagttcttcagtgacgcccgagagcttcagggacagattgaggagaagcggaggcggctgccccgcctgaccaccccgcctgagccgagacccagtgccagttccatgcagcggaccctgagagcctttgagcatgacctgcagctcctcgtgtcccaggtacggcagctgcaggagggggcggcccagctgcggacggtgtatgcgggtgaacatgccgaggccatcgctagccgggagcaggaggtgctgcagggttggaaagagctgctgtcagcctgtgaggatgcccgcctgcatgtcagctccacagccgacgccctgcgcttccacagccaagtccgcgacctgctctcctggatggatggcatcgccagccagattggggcagccgacaagcccagggacgtgtcatcagtggaggtgctcatgaactaccaccagggcctgaagactgagctggaggcgcgggtgcctgagctgaccacctgccaggagctggggcgatctctgctgctcaacaaaagtgccatggctgatgagatccaggcacagctggacaagctgggaaccaggaaggaggaggtgtcggaaaagtgggaccgccattgggagtggctgcagcagatgctggaggtgcaccagtttgcccaggaggcggtggtggctgatgcctggctgacagcccaggagccgctcctgcagagccgggagctgggcagcagcgtggatgaggtggagcagcttatccggcgacatgaggccttccgcaaagcggctgcagcctgggaagagaggttcagctctctgcggcgcctgaccacgcctaggcgggaggatcacttgaacccaggagttcaagaccagccttggcaacatactgagaagccgtctctaccaaaaccaaaagcaaacaaagaaaaaacagccaggcgtgatggcacgtgcctgtag

SEQ ID NO: 56 - DNA, 867 bp, Homo sapiens
atgaaggaccgaacccaggagctccgcacggccaaggacagcgatgatgatgatgatgtcgctgtcaccgtggaccgagaccgcttcatggatgagttctttgagcaggtggaggagattcgaggcttcattgacaagatcgcagagaacgtggaggaggtgaagcggaagcacagtgccatcctggcatcccccaaccccgatgagaagacgaaggaggagctggaagaactcatgtccgacataaagaagacagcaaacaaagttcgttccaagttaaagagcatcgagcagtccatcgagcaagaggaaggcctgaaccgctcctccgctgacctgaggatccggaagacacagcactccacgctgtccagaaagtttgtggaggtcatgtcggagtacaacgccacgcagtccgactaccgcgagcgctgcaaaggccgcatccagaggcagctggagatcaccggcaggaccacgaccagtgaggagctggaggacatgctggagagtgggaaccccgccatctttgcctctgggatcatcatggactccagcatctcgaagcaggctctgagcgagattgagacgcggcacagtgagatcatcaagctggagaacagcatccgtgagctacacgacatgttcatggacatggccatgctcgtggagagccagggagagatgattgacaggatcgagtacaatgtggaacacgcggtagactatgtggagagggccgtgtctgacaccaagaaggccgtcaagtaccagagcaaggcgcgccggaagaaaatcatgatcatcatctgctgtgtgatcctgggcatcgtcatcgcctccactgttgggggcatcttcgcctag

SEQ ID NO: 57 - DNA, 2118 bp, Homo sapiens
atgaactacctgcggcgccgcctgtcggacagcaactttatggccaatctgccaaatgggtacatgacagacctgcagcgtccgcagccgcccccaccgccgcccggtgcccacagccccggagccacgcccggtcccgggaccgccactgccgagaggtcctccggggtcgccccagcggcctctccggccgcccctagccccgggtcctcggggggcggtggcttcttctcgtcgctgtccaacgcggtcaagcagaccacggcggcggcagctgccaccttcagcgagcaggtgggcggcggctctgggggcgcaggccgcgggggagccgcctccagggtgctgctggtcatcgacgagccgcacaccgactgggcaaaatacttcaaagggaaaaagatccatggagaaattgacattaaagtagaacaggccgaattctctgatctcaaccttgtggcccatgccaatggtggattctctgtggatatggaagttcttcggaatggggtgaaggtcgtgcggtctctgaagccggattttgtgctgatccgccagcacgccttcagcatggcacgcaacggagactaccgcagtttggtcattgggctgcagtatgctggaatccccagtgttaactccttgcattctgtctacaacttctgtgacaagccctgggtgtttgcccagatggttcgactgcataagaaactggggacagaagaattccctctaattgatcagaccttctaccccaatcacaaagaaatgctcagcagtacaacgtaccccgtggttgtgaagatggggcacgcacactctgggatgggcaaggtcaaggttgacaaccagcatgacttccaggacatcgcaagtgtcgtggcactgaccaagacgtatgccactgccgagcccttcatcgatgccaaatatgacgtgcgtgtccagaagattgggcagaactacaaggcctacatgaggacgtcagtgtcagggaactggaagaccaatactggctctgcgatgctggagcaaattgccatgtctgacagatacaagctgtgggtggacacgtgctcagagatttttgggggactggacatctgcgcagtggaagcgctacatggcaaggacggaagggatcacatcattgaggtggtgggttcctccatgccgctcattggtgaccaccaggatgaagacaaacagctcatcgtagagctcgtggtcaacaagatggctcaggccctgccccggcagcgacagcgggatgcctcccctggcaggggctcccatggccagactccgtccccaggggccctgcccttgggccgccagacctcccagcagcccgcagggcccccggctcagcagcgacccccaccacagggcggccctccacagccgggtccaggcccccagcgccagggacccccattgcagcagcgcccgcccccgcagggccagcagcacctttcaggccttggacccccagctggcagccccctgccccagcgccttccaagtcccacctcagcgccccagcagcccgcgtcccaggccgcgccgccgacccagggtcaaggccgccaatcccggccagtggcgggaggccccggggcgcctccagcagcccgcccgcccgcctctccgtctccccagcgccaggcgggccccccacaggctacccgtcagacatccgtctctggcccggctccgccaaaggcctctggggccccaccgggcgggcagcagcgccagggcccgccccagaaacccccaggcccagccggccccacacgccaggccagccaggcgggtcccgtgccccgcactgggccacccaccacgcagcagcctcggcccagcggcccgggccccgctggacgtcccaaaccacagctggcccagaaacccagccaggacgtgccgccacccgccaccgccgctgcagggggacctccgcacccccagctcaacaaatcccagtctctgaccaatgccttcaaccttccagagccagccccgcccaggcccagccttagccaggacgaggtgaaagctgagaccatccgcagcctgaggaagtctttcgccagcctcttctccgactga

SEQ ID NO: 58 - DNA, 2214 bp, Homo sapiens
atgcagccccgccgcgcccaggcgcccggtgcgcagctgctgcccgcgctggccctgctgctgctgctgctcggagcggggccccgaggcagctccctggccaacccggtgcccgccgcgcccctgtctgcgcccgggccgtgcgccgcgcagccctgccggaatgggggtgtgtgcacctcgcgccctgagccggacccgcagcacccggcccccgccggcgagcctggctacagctgcacctgccccgccgggatctccggcgccaactgccagcttgttgcagatccttgtgccagcaacccttgtcaccatggcaactgcagcagcagcagcagcagcagcagcgatggctacctctgcatttgcaatgaaggctatgaaggtcccaactgtgaacaggcacttcccagtctcccagccactggctggaccgaatccatggcaccccgacagcttcagcctgttcctgctactcaggagcctgacaaaatcctgcctcgctctcaggcaacggtgacactgcctacctggcagccgaaaacagggcagaaagttgtagaaatgaaatgggatcaagtggaggtgatcccagatattgcctgtgggaatgccagttctaacagctctgcgggtggccgcctggtatcctttgaagtgccacagaacacctcagtcaagattcggcaagatgccactgcctcactgattttgctctggaaggtcacggccacaggattccaacagtgctccctcatagatggacgaagtgtgaccccccttcaggcttcagggggactggtcctcctggaggagatgctcgccttggggaataatcactttattggttttgtgaatgattctgtgactaagtctattgtggctttgcgcttaactctggtggtgaaggtcagcacctgtgtgccgggggagagtcacgcaaatgacttggagtgttcaggaaaaggaaaatgcaccacgaagccgtcagaggcaactttttcctgtacctgtgaggagcagtacgtgggtactttctgtgaagaatacgatgcttgccagaggaaaccttgccaaaacaacgcgagctgtattgatgcaaatgaaaagcaagatgggagcaatttcacctgtgtttgccttcctggttatactggagagctttgccagtccaagattgattactgcatcctagacccatgcagaaatggagcaacatgcatttccagtctcagtggattcacctgccagtgtccagaaggatacttcggatctgcttgtgaagaaaaggtggacccctgcgcctcgtctccgtgccagaacaacggcacctgctatgtggacggggtacactttacctgcaactgcagcccgggcttcacagggccgacctgtgcccagcttattgacttctgtgccctcagcccctgtgctcatggcacgtgccgcagcgtgggcaccagctacaaatgcctctgtgatccaggttaccatggcctctactgtgaggaggaatataatgagtgcctctccgctccatgcctgaatgcagccacctgcagggacctcgttaatggctatgagtgtgtgtgcctggcagaatacaaaggaacacactgtgaattgtacaaggatccctgcgctaacgtcagctgtctgaacggagccacctgtgacagcgacggcctgaatggcacgtgcatctgtgcacccgggtttacaggtgaagagtgcgacattgacataaatgaatgtgacagtaacccctgccaccatggtgggagctgcctggaccagcccaatggttataactgccactgcccgcatggttgggtgggagcaaactgtgagatccacctccaatggaagtccgggcacatggcggagagcctcaccaacatgccacggcactccctctacatcatcattggagccctctgcgtggccttcatccttatgctgatcatcctgatcgtggggatttgccgcatcagccgcattgaataccagggttcttccaggccagcctatgaggagttctacaactgccgcagcatcgacagcgagttcagcaatgccattgcatccatccggcatgccaggtttggaaagaaatcccggcctgcaatgtatgatgtgagccccatcgcctatgaagattacagtcctgatgacaaacccttggtcacactgattaaaactaaagatttgtaa

SEQ ID NO: 59 - DNA, 1407 bp, Homo sapiens
atgcccgaggacggcgctggcgacggcggggaggtgcccgcgctcatcccggacggcgagccgctgcgggaagagcagcggcccctgaaacagtccctgggaagctccctgtgccgcgagtcgcactggaagtgcctgctcctcacgctgctcatccacgcctgcggggccgtggtggcctggtgtcgcctggccacagtgccgcggctggtcctggggcccgaggccgccttggcccggggagccgggggcccgccaccgacctacccggccagcccctgctccgatggctacctgtacatcccgctggccttcgtctccctcctctacctcctctacctggctgagtgctggcactgtcacgtgcggtcctgccaggcgccacgcaccgacgcccacacggtgctggcgctgatccgccggctgcagcaggcgccgccgtgcgtctggtggaaggccaccagctatcactacgtgcggcgcacacgccagatcacgcgctaccgcaacggcgacgcctacaccaccacgcaggtgtaccatgagcgcgctgacagccgcacggcccgcggcgagtttgactactcggcgcacggcgtccgcgacgtctccaaggagctggtggggctggcggagcacgcggccacgcggctgcgcttcaccaagtgcttcagcttcggcagcgcggaggccgaggcctcgtacctcacgcagcgggcgcgcttcttcagcgccaacgagggcctggacgactatctggaggcgcgcgagggcatgcacctgaaggacgtagacttccgcgagtcgctcatggtcttcgccgacccccgcagcccgccctggtacgcgcgcgcctgggtcttctggctcgtgtcggcggccacgctgtcgtggcccctgcgcgtcgtggccgcctatggcacggctcacgtgcactaccaggtggagaagctctttggcgccagctcgcccccgccgggggccgtgcccagcgggcccccgctgtcccgcgtggccacagtggacttcactgagctcgagtggcacatctgctccaaccggcagctggtgcccagctactcggaggccgtggtcatgggcgcgggctcgggcgcctacctcagaggctgccagcgctgccgccgctctgtcagcagcaactcgctgccccccgcccggcccagcgggccccgcctgcccttcagccgcagccgcctctcgctgggcgctggcggccgggccacgccaggggtcttccgcagcctgagcggggggccgctggggcgccgtggagaggacacggaacccctggagagcccgccctgctatgaggacgccctctacttcccggtgctcattgtccacggagacagcggctgccagggggatgggcagggtgctctctga

SEQ ID NO: 60 - DNA, 1554 bp, Homo sapiens
atggggctgggtcagccccaggcctggttgctgggtctgcccacagctgtggtctatggctccctggctctcttcaccaccatcctgcacaatgtcttcctgctctactatgtggacacctttgtctcagtgtacaagatcaacaaaatggccttctgggtcggagagacagtgtttctcctctggaacagcctcaatgaccccctcttcggttggctcagtgaccggcagttcctcagctcccagccccggtcaggcgccgggctctcctcaagggctgtggtgctggcccgggtgcaggccctgggctggcatgggccgctgctggcgctgtcgttcctggcgttctgggtgccctgggccccagctggcctgcagttcttgctgtgcctgtgcctctatgatggcttcctgacgctcgtggacctgcaccaccatgccttgctggccgacctggccctctcagcccacgaccgcacccacctcaacttctactgctccctcttcagcgcggccggctccctctctgtctttgcatcctatgccttttggaacaaggaggatttctcctccttccgcgctttctgcgtgacactggctgtcagctctgggctgggctttctgggggccacacagctgctgaggcggcgggttgaggcggcccgaaaggacccagggtgctcaggcctggttgtggatagcggcctgtgtggagaggagctgcttgtaggcagtgaggaggcggacagcatcaccttgggccggtatctccggcagctggcacgccatcggaacttcctgtggttcgtgagcatggacctggtgcaggtcttccactgccacttcaacagcaacttcttccctctcttcctggagcatctgttgtccgaccatatctccctttccacgggctccatcctgttgggcctctcctatgtcgctccccatctcaacaacctctacttcctgtccctgtgccggcgctggggcgtctacgcggtggtgcgggggctcttcctgctcaagctgggacttagcctgctcatgttgttggccggcccggaccacctcagcctgctgtgcctcttcattgccagcaaccgcgtcttcactgagggcacctgtaagctgctgaccttggtggtcactgacctggtagacgaggacctggtgctgaaccaccgcaagcaggcagcctcggcactcctctttggcatggttgccttggtgaccaagccaggccagacctttgccccgctgctgggcacctggctgctctgtttctacacaggtcatgacctcttccagcagtccctcataacccctgtggggagtgcccatccctggccagagcccccagctccagcccctgcacaggccccgacgctccgccagggctgcttctacctgctggtgctggtgcccatcacctgtgctctgctgcagctcttcacctggtcccagttcacgctgcatgggagacgcctgcacatggtcaaggcccagcgccagaacctgtcacaggcccaaaccctggatgttaagatggtgtga

SEQ ID NO: 61 - DNA, 1173 bp, Homo sapiens
atgaaggaggggagagggagcttcagcgtggagagaggaccgcggaaggagagagagacagcccagagtggaatgtggaagggaaacagtccagcggggagccagggggcagccatggaagggacaggtggggagctggggggacaggggaactggggtccggaggacgccccaggcctcttggccagggcctccctgatcatgctcccgtggccactacccctggcctcctcggccctcaccttgctcttcggggccctcacttccctgttcctctggtactgctaccgcctgggctcccaagacatgcaggccctaggggctgggagccgagctgggggtgttcgtggtgggcctgtgggatgctcggaggccggcgggccaagcccagggggtcctggggatcccggggaaggacctaggacggaaggcctagtgagccggcggcttcgggcctacgcaaggcgctactcctgggctgggatgggtagagtgaggcgggcagctcagggtggcccaggccctgggagagggccaggggtcctaggtattcagcgcccaggcctgcttttcctaccagacctgccttcagccccctttgtgccgcgggacgcccagcggcacgacgtggagctcctggagagcagcttccctgccattttgcgggacttcggggctgtgagctgggacttctcagggactacccctccgcctcggggctggtccccacctctggcccccgggtgctaccagctcctgctgtaccaagcaggccggtgccaacccagcaactgccgccggtgcccgggggcctatcgggcactgagggggcttcgaagctttatgagtgccaacaccttcggcaatgccggcttttccgttctcctgcctggggcccggctcgagggccgctgtgggcccaccaatgcccgggtcagatgccatctgggcctaaagatccctcctggctgtgagctggtggtcggcggtgagccccagtgctgggctgaggggcactgtctactggtggacgactcttttctacacacagtggctcacaatggctcccccgaagatgggcctcgagtggtcttcatcgtggacctctggcaccccaacgtggcaggggctgagcgccaggccctcgactttgtcttcgccccagacccttga

SEQ ID NO: 62 - DNA, 1113 bp, Homo sapiens
atgggcggcggcgacggggccgcatttaagcggccgggggacggcgcccgcctccagcgcgtcctcgggcttggctcccgccgggagccccgttctctgcccgccgggggccccgcgccgcgccgcaccgcgccgcccccgccgggccatgcgagcgcgggccccgccgcgatgagctcgcacatcgccaaaagcgagtccaagacgtcgctgctgaaggcggcggcggcggcggcgagcgggggcagccgggctccccgccacggccctgcccgggacccggggctgcctagccgccggctacccggctcctgcccggcgacgccgcagtcgtccggggaccccagttcgcggaggcccctgtgccggccggcgccgcgagaggagggcgcgcgggggagccagcgtgtgctcccccaggcgcactgcaggccccgggaggcgctgccggccgcggcgtcccgaccttcgccgtcgtcgccgctgccgccggcccgcgggcgggatggggaggaacggggactgtccccggcgctcggcctccggggctctctgcgagcccggggccgcggggactccgttccagccgccgcgtccgaggcggacccgttcctccaccggctgcgccccatgctcagctccgcctttggccaggatagatcactgcgaccagaggaaattgaagagctccgagaggccttcagagaattcgacaaggacaaggatggctacatcaactgccgggatctgggcaactgcatgcgcaccatgggctacatgcccaccgagatggagctcatcgaactgtcccagcagatcaacatgaacctgggtggccatgtagattttgatgacttcgtggagctaatggggcctaaactcctggcagagacagcagatatgattggtgtaaaggaactgcgagatgctttccgagagtttgacaccaatggtgatggggaaataagcaccagtgagctgcgagaggctatgaggaagctcctgggtcatcaggtgggacaccgagacatagaggaaattatccgagatgtggacctcaatggggatggacgagtggactttgaagagtttgtccggatgatgtcccgctga

SEQ ID NO: 63 - DNA, 243 bp, Homo sapiens
atgggcagagcaatggtggccaggcttgggctggggctgctgctgctggcactgctcctacccacgcagatttattccagtgaaacaacaactggaacttcaagtaactcctcccagagtacttccaacactgggttggccccaaatccaactaatgccaccaccaaggcggctggtggtgccctgcagtcaacagccagtctcttcgtggtctcactctctcttctgcatctctactcttaa

SEQ ID NO: 64 - DNA, 1173 bp, Homo sapiens; identical to SEQ ID NO: 61

SEQ ID NO: 65 - DNA, 1674 bp, Homo sapiens
atgaagaagatgagcaacatttatgagtccgctgccaacacactgggaatctttaacagcccctgcctgaccaaagttgagctgcgtgtggcgtgcaaaggcatttctgacagagatgccctttccaaaccagacccctgtgtcatcctcaagatgcagtctcatgggcagtggtttgaggttgacaggactgaggtgattcgcacctgcataaacccagtgtactcaaaactgtttactgtggacttttactttgaggaggtgcagcgcctgcggtttgaagtccatgacatcagcagcaaccacaatgggctgaaggaggccgacttccttggtggcatggagtgcacacttggccagattgtttcccagagaaagctgtccaaatccttgctgaagcatgggaacacagcagggaaatcttccatcacggtgattgctgaagaattatctggcaatgacgactatgttgagcttgcattcaatgcacggaaattggatgacaaggatttcttcagtaaatctgacccatttctggaaatttttcgtatgaatgatgatgcaactcagcagctggtgcaccgaactgaggttgtgatgaataacttaagcccagcctggaaatcattcaaagtatctgtaaattctctatgcagcggagacccagaccgccggctaaagtgcatagtatgggactgggactccaatggcaagcatgacttcattggagaattcacctcgacattcaaggagatgagaggagcaatggaagggaaacaggtgcagtgggagtgcatcaatcccaagtacaaagccaagaagaagaattacaagaactcaggcactgtgattctgaatctgtgcaagattcacaagatgcattctttcttggactacatcatgggtggctgccaaatccagtttacagtagctatagatttcactgcctcaaacggggaccccaggaacagctgttccttgcactacatccacccttaccaacccaatgagtatctgaaagctttggtagctgtgggggagatttgccaagactatgacagtgacaaaatgttccctgcctttgggtttggcgccaggatacctccagagtacacggtctctcatgactttgcaatcaactttaatgaagacaacccagaatgtgcaggaattcaaggagttgtggaagcctatcagagctgtcttcctaagctccaactctacggtcccaccaacattgcccccatcatccagaaggttgccaagtcagcgtcagaggaaactaacaccaaggaggcatcgcaatacttcatcctgctgatcctgacagatggtgttatcacagacatggccgacacccgggaggccattgtccatgcctcccacctccccatgtcagtcatcatcgtgggagtagggaacgctgacttcagtgacatgcagatgctggacggtgatgatgggattctgaggtcacccaagggagagcctgttcttcgagacatcgtccagttcgtgcccttcaggaacttcaaacacgcatctccagctgccctggcaaagagcgtgctggctgaagtcccaaaccaagttgtggactattacaatggcaaaggaattaaaccaaaatgttcatcagaaatgtatgaatcttccagaacactagcaccatga

SEQ ID NO: 66 - DNA, 1674 bp, Homo sapiens; identical to SEQ ID NO: 65

SEQ ID NO: 67 - DNA, 1674 bp, Homo sapiens; identical to SEQ ID NO: 65

SEQ ID NO: 68 - DNA, 417 bp, Homo sapiens
atgcccaacttctctggcaactggaaaatcatccgatcggaaaacttcgaggaattgctcaaagtgctgggggtgaatgtgatgctgaggaagattgctgtggctgcagcgtccaagccagcagtggagatcaaacaggagggagacactttctacatcaaaacctccaccaccgtgcgcaccacagagattaacttcaaggttggggaggagtttgaggagcagactgtggatgggaggccctgtaagagcctggtgaaatgggagagtgagaataaaatggtctgtgagcagaagctcctgaagggagagggccccaagacctcgtggaccagagaactgaccaacgatggggaactgatcctgaccatgacggcggatgacgttgtgtgcaccagggtctacgtccgagagtga

SEQ ID NO: 69 - DNA, 2214 bp, Homo sapiens; identical to SEQ ID NO: 58

SEQ ID NO: 70 - DNA, 1338 bp, Homo sapiens
atggatccactgaatctgtcctggtatgatgatgatctggagaggcagaactggagccggcccttcaacgggtcagacgggaaggcggacagaccccactacaactactatgccacactgctcaccctgctcatcgctgtcatcgtcttcggcaacgtgctggtgtgcatggctgtgtcccgcgagaaggcgctgcagaccaccaccaactacctgatcgtcagcctcgcagtggccgacctcctcgtcgccacactggtcatgccctgggttgtctacctggaggtggtaggtgagtggaaattcagcaggattcactgtgacatcttcgtcactctggacgtcatgatgtgcacggcgagcatcctgaacttgtgtgccatcagcatcgacaggtacacagctgtggccatgcccatgctgtacaatacgcgctacagctccaagcgccgggtcaccgtcatgatctccatcgtctgggtcctgtccttcaccatctcctgcccactcctcttcggactcaataacgcagaccagaacgagtgcatcattgccaacccggccttcgtggtctactcctccatcgtctccttctacgtgcccttcattgtcaccctgctggtctacatcaagatctacattgtcctccgcagacgccgcaagcgagtcaacaccaaacgcagcagccgagctttcagggcccacctgagggctccactaaagggcaactgtactcaccccgaggacatgaaactctgcaccgttatcatgaagtctaatgggagtttcccagtgaacaggcggagagtggtgcaggaggctgcccggcgagcccaggagctggagatggagatgctctccagcaccagcccacccgagaggacccggtacagccccatcccacccagccaccaccagctgactctccccgacccgtcccaccatggtctccacagcactcccgacagccccgccaaaccagagaagaatgggcatgccaaagaccaccccaagattgccaagatctttgagatccagaccatgcccaatggcaaaacccggacctccctcaagaccatgagccgtaggaagctctcccagcagaaggagaagaaagccactcagatgctcgccattgttctcggcgtgttcatcatctgctggctgcccttcttcatcacacacatcctgaacatacactgtgactgcaacatcccgcctgtcctgtacagcgccttcacgtggctgggctatgtcaacagcgccgtgaaccccatcatctacaccaccttcaacattgagttccgcaaggccttcctgaagatcctccactgctga

SEQ ID NO: 71 - DNA, 1419 bp, Homo sapiens
atgttcaggggcgcttggatgtggcccgggaaagacgccgccgcgctgactatctgctgctgctgctgctgctgggctcccaggccgagcgacaaaccttgcgccgactccgagcgggcgcagcgatggcgactgtccctggcgtccctgctcttcttcaccgtgctgctcgctgaccatctgtggctgtgcgcgggggcccggccccgggccagggagctgagcagcgccatgcggcccccatggggggccggccgggagcggcagccggtgcctcctcgcgcggtgctgccgctgccgccgccgccgcccggcgagcccagcgcgcccccaggcacctgcggccccagatacagcaacctgaccaaagccgcccccgccgccggctctcggccggtctgcggcggcgtcccagagcccacggggctggacgcagcttgcaccaaattgcaatctttgcagagacttttcgaaccgactactccggccccccctctgcggccccctgactccctttcccgtgccccggccgagttcccctccgccaaaaaaaacttgctcaaaggccactttcggaacttcactctctccttttgcgacacctacacggtctgggacttgctgctgggcatggaccgccccgacagcctggactgtagcctggacaccctgatgggggacctgctggccgtggtggccagcccgggctccggggcctgggaggcgtgtagcaactgtatcgaggcgtaccagcggctggaccgacacgctcaggaaaaatatgacgagttcgacctcgtgctgcataaatacttacaggcggaagagtactcaatccggtcctgcacgaaaggctgtaaggctgtctacaaggcctggctgtgctcagaatacttcagcgtgacccagcaggaatgccagcgctgggtgccctgcaagcaatactgcctggaggtgcagacccggtgcccctttatactccccgacaatgaggaaatggtgtacggagggctccctggctttatctgtacagggttgctggatacttcaccaaagcgtctggaaaccaagtgctgtgacgtgcagtgggtctcctgtgaggcgaagaagaagaagttcaaggagtctgaggcccccaaaacccaccagcagcaattccaccactcctatttccaccactaccaccaacagtaccatcactaccacccccatcatgatcccccaggccgtgtcagcaacaagcccgccctgctgccggtctctgggggctcccgcctcagccctagcaggatccggctctgcgtccttgttctcatgctcctccataccgtggtgtccttctccagcaaccagggtggtgggggattggggctggagacactgcctgccctagaggagggcctgacacgggaagagtga

SEQ ID NO: 72 - DNA, 2544 bp, Homo sapiens
atgtttaagtgctggtcagttgtcttggttctcggattcatttttctggagtcggaaggaaggccaaccaaagaaggaggatatggccttaaatcctatcagcctctaatgagattgcgacataagcaggaaaaaaatcaagaaagttcaagagtcaaaggatttatgattcaggatggcccttttggatcttgtgaaaataagtactgtggtttgggaagacactgtgttaccagcagagagacagggcaagcagaatgtgcctgtatggacctttgcaaacgtcactacaaacctgtgtgtggatctgacggagaattctatgaaaaccactgtgaagtgcacagagctgcttgcctgaaaaaacaaaagattaccattgttcacaatgaagactgcttctttaaaggagataagtgcaagactactgaatacagcaagatgaaaaatatgctattagatttacaaaatcaaaaatatattatgcaagaaaatgaaaatcctaatggcgacgacatatctcggaagaagctattggtggatcaaatgtttaaatattttgatgcagacagtaatggacttgtagatattaatgaactaactcaggtgataaaacaggaagaacttggcaaggatctctttgattgtactttgtatgttctattgaaatatgatgattttaatgctgacaagcacctggctcttgaagaattttatagagcattccaagtgatccagttgagtctgccagaagatcagaaactaagcatcactgcagcaactgtgggacaaagtgctgttctgagctgtgccattcaaggaaccctgagacctcccattatctggaaaaggaacaatattattctaaataatttagatttggaagacatcaatgactttggagatgatgggtccttgtatattactaaggttaccacaactcacgttggcaattacacctgctatgcagatggctatgaacaagtctatcagactcacatcttccaagtgaatgttcctccagtcatccgggtgtatccagagagtcaggctagagagcctggggtaactgccagtcttaggtgccatgcagagggcataccaaagcctcagcttggctggttgaagaatggaattgatattacaccaaagctttccaaacaactcacgcttcaagcaaatggcagtgaggttcacataagcaatgtgcgctatgaagatactggagcatacacttgtatcgcaaagaatgaagcaggagtggatgaagacatctcttctctttttgtggaagactctgctagaaagaccctagctaacatattatggagagaagaaggtctgggaattgggaacatgttctatgttttttatgaagatggaatcaaagtgatacaacccatagaatgtgaatttcagaggcacattaagcctagtgaaaagctccttggatttcaggatgaagtctgtcccaaagctgagggagatgaagttcagaggtgtgtgtgggcatcagctgttaatgtcaaagacaagttcatttatgttgcacagccaactttggacagagtccttattgttgatgtgcagtcccaaaaagttgttcaggcagtgagcacagaccctgtcccagttaaattacactatgacaaatcacatgatcaggtctgggtgctaagctggggtaccttggagaagacatcaccaacactacaggtaattaccctggccagtgggaatgtgcctcaccacacgatccacacccaaccagtgggaaagcaatttgacagagtggatgattttttcattcccaccacaacactcattatcacccatatgaggtttggatttattcttcataaagatgaagctgcactacaaaaaattgatcttgaaaccatgtcatacatcaagacaattaacttgaaggactataagtgcgttcctcagtcattggcatatacacacttgggaggctactacttcattggctgcaaacctgacagcaccggagcagtttccccacaggtcatggtggacggtgtaactgactcagtcattgggttcaatagtgatgtgacgggcactccatatgtctctccagatggccactaccttgtcagcattaatgatgtgaaaggtcttgtaagggttcagtacattaccatcagaggagaaatacaggaggcttttgatatttacacaaatctgcacatatctgatctggcatttcaaccatcctttactgaagcccaccaatataacatctacggtagttcaagcacacaaactgatgtgctctttgtggagctctcttctgggaaggtcaagatgataaagagtctcaaggaaccactcaaggcagaagaatggccttggaaccggaaaaacaggcaaatccaggacagtggcttgtttggtcaatacctgatgacaccttccaaggactctctcttcatcctagatggacgactcaataaattaaactgtgagatcactgaagttgaaaaaggaaatacagtcatttgggttggagatgcctaa

SEQ ID NO: 73 - DNA, 1095 bp, Homo sapiens
atgtcgggccctcgcgccggcttctaccggcaggagctgaacaagaccgtgtgggaggtgccgcagcggctgcaggggctgcgcccggtgggctccggcgcctacggctccgtctgttcggcctacgacgcccggctgcgccagaaggtggcggtgaagaagctgtcgcgccccttccagtcgctgatccacgcgcgcagaacgtaccgggagctgcggctgctcaagcacctgaagcacgagaacgtcatcgggcttctggacgtcttcacgccggccacgtccatcgaggacttcagcgaagtgtacttggtgaccaccctgatgggcgccgacctgaacaacatcgtcaagtgccaggcgctgagcgacgagcacgttcaattcctggtttaccagctgctgcgcgggctgaagtacatccactcggccgggatcatccaccgggacctgaagcccagcaacgtggctgtgaacgaggactgtgagctcaggatcctggattttgggctggcgcgccaggcggacgaggagatgaccggctatgtggccacgcgctggtaccgggcacctgagatcatgctcaactggatgcattacaaccaaacagtggatatctggtccgtgggctgcatcatggctgagctgctccagggcaaggccctcttcccgggaagcgactacattgaccagctgaagcgcatcatggaagtggtgggcacacccagccctgaggttctggcaaaaatctcctcagaacacgcccggacatatatccagtccctgccccccatgccccagaaggacctgagcagcatcttccgtggagccaaccccctggccatagacctccttggaaggatgctggtgctggacagtgaccagagggtcagtgcagctgaggcactggcccacgcctacttcagccagtaccacgaccccgaggatgagccagaggccgagccatatgatgagagcgttgaggccaaggagcgcacgctggaggagtggaaggagctcacttaccaggaagtcctcagcttcaagcccccagagccaccgaagccacctggcagcctggagattgagcagtga

SEQ ID NO: 74 - DNA, 1233 bp, Homo sapiens
atgctgatgcccctgtgtgggctgctctggtggtggtggtgctgctgctccggctggtactgctatggattgtgtgccccagccccccagatgttgcgccaccagggtctcctcaagtgccgctgccgcatgctcttcaatgacctgaaggttttcttactgcggcgccctcctcaagcgcccctgcccatgcacggcgacccccagccccccggtttggcggccaacaacacccttccggctctgggcgccggggggtgggcaggctggaggggcccccgagaagtggtgggcagggagccccctcctgtgccacctccaccccccttgccaccttcttctgtggaagatgactggggtggcccagccacagagccacctgcctcgctgctcagcagtgcctcctcagatgacttctgtaaggagaagaccgaggatcgctactcactgggcagcagcttggacagtggtatgaggaccccactctgccgcatctgcttccaggggccagaacagggggagctgctgagcccatgccgctgtgatggctcggtcaagtgcacacaccagccttgcctcatcaagtggatcagcgagcggggctgctggagctgcgagctgtgctactacaagtaccacgtcatcgccataagcacaaaaaatcctctgcagtggcaggccatctctctgacggtcattgagaaggttcaggttgcagccgccatcctgggctccctcttcctcatcgccagtatttcttggctcatctggtcaactttcagcccctcggcaagatggcagcgccaagaccttctcttccagatctgctacgggatgtatggcttcatggacgtggtgtgcataggtctcatcatccatgaaggaccctcggtgtaccgcatctttaaacggtggcaggctgtcaaccagcagtggaaagtgctgaactatgacaagacaaaagacctggaggatcaaaaggcaggaggcaggaccaacccccggacctcctcatccacccaggccaatatcccctcctcggaagaggagaccgcaggcacccctgcccctgagcagggccctgcccaggctgccggccacccctcaggccctctgtcccatcaccactgtgcttataccatcctgcacatcctgagtcacttgagacctcatgaacagcgaagtcccccaggcagcagccgagagctggtcatgagagtcacgacagtgtga

SEQ ID NO: 75 - DNA, 1260 bp, Homo sapiens
atggcccggaggtatgatgagctgccgcactacccaggcatcgtggatggccccgcagccctggctagcttcccagagacagtgcccgcagtaccagggccctatggcccgcaccggcctccccagcccctgcccccaggcttggacagcgacggcctgaagagggagaaggatgagatctatggacacccgctcttccccctcttggccctggtctttgagaaatgtgaactggctacatgctctccccgtgacggggccggagctgggctggggacaccccctggaggtgacgtctgctcctctgattccttcaacgaggacatcgctgcctttgccaagcaggttcgctctgagaggcccctcttctcctccaacccagaactggacaatctgatgatccaggccatccaggtgctgcggttccacctgctggagctggagaaggtccacgacctgtgcgacaacttctgtcaccgctacatcacctgcctcaagggaaagatgcccatcgacctggtcatcgaggatcgggacggcggctgcagggaggacttcgaggactacccagcctcctgccccagcctcccagaccagaataatatgtggattcgagaccatgaggatagtgggtctgtacatttggggaccccaggtccatccagtgggggcctggcctcccagagtggggacaactccagtgaccaaggagacgggctggacaccagcgtggcctctcccagttctggtggagaagatgaggacttggaccaggagcgacggcgaaacaagaagagggggatcttccccaaggtggccaccaacatcatgcgagcctggttgttccagcacctctcgagacgctcagaagcgccggttctcccagacgtctgcctgggcctgggctccccatcccccggaccccggtgggccagaccttggggttcagactgcggccggccaggcaggcagagtgactcttgctggtggctgcagcacccgtacccctcggaggagcagaagaaacagctggcgcaggacacggggctcaccatcctgcaagtcaacaactggttcattaacgcccggagacgcatcgtgcaacctatgatcgatcaatccaaccgcacagggcagggtgcagccttcagcccagagggccagcccatcgggggctataccgagacgcagccacacgtggccgtccggcctccgggatcagtggggatgagtttgaacttggaaggagaatggcattat

SEQ ID NO: 76 - DNA, 3033 bp, Homo sapiens
atgagtcagctgaggctgctgccgtcccgtcttggggtacaggctgcgaggctcctggctgcacatgacgtcccggtgtttggctggcgcagcaggtcctccgggccaccggccaccttcccaagcagcaaaggtggaggcggctccagttacatggaggagatgtacttcgcctggttggaaaacccccagagtgtccacaagtcctgggacagcttcttcagggaagccagcgaggaagccttttctggctctgctcagccacggcccccttctgttgtccatgagagcaggtctgcagtctcaagtcggaccaagaccagcaaattggtggaggaccacctggctgtgcagtccctgatccgggcctaccagatccggggtcaccatgtggcccagctggaccccctgggcattctggatgcagacctggactcctttgtgccctcagacttgatcacaaccattgataaactggccttctatgaccttcaggaggctgaccttgataaggagttccagctgccgacaaccaccttcattgggggctctgaaaacaccctctctctgcgggagatcattcggcgcctggagaacacctactgccagcacattggcctggagttcatgttcatcaacgatgtggagcagtgccagtggatccggcagaagtttgagacccctggtgtgatgcagttctccagcgaggagaagcggaccctgctggcccggctagtgcgctccatgaggtttgaagacttcctggcccggaaatggtcctcagagaagcggtttggcctggagggctgtgaagtgatgattcctgccctcaagaccatcatcgacaaatccagcgagatggggattgagaatgtcatcttggggatgccacacaggggaaggctgaacgtgctggccaacgtgatccgcaaggacctggagcagatcttctgccagtttgaccccaagctggaggcggcggacgagggctccggggatgtcaagtaccacctgggcatgtaccatgagaggatcaaccgcgtcaccaaccggaacatcactctgtcgctggttgccaacccctcccacctggaggcagtggaccctgtggtgcaggggaagacaaaggcagagcagttctaccgtggagatgcccagggcaagaaggtcatgtccatcctggttcatggggacgccgcctttgctggccagggcgtggtatatgagaccttccacctgagcgacctgccctcctacacgaccaatggtaccgtgcacgtcgtcgtcaacaaccagattggattcaccacagacccccgaatggcccgctcctcaccatacccgaccgacgtggcccgggtggtcaatgcgcctatcttccatgtgaatgccgatgacccagaggctgtgatatatgtgtgcagtgtggcagccgaatggagaaacactttcaacaaagatgttgtcgtggacctggtctgttaccgccggcgtggccacaatgagatggacgagcccatgttcacccagccgctcatgtacaagcagatccacagacaggtgcctgtgctgaagaagtacgcagacaagctgattgccgagggcacagtcaccctgcaggagtttgaggaagaaattgccaaatacgaccggatctgtgaggaggcttatggcaggtccaaggataaaaagattctgcatataaagcactggttggactccccctggcctggcttcttcaacgtagatggggagcccaagagcatgacatgcccagccacggggatccctgaggacatgctcacccacatcggcagtgtggccagctctgtgcccctggaggactttaagatccacactggcctctctcgcattctgcggggccgtgcggacatgaccaagaaccggacggtggactgggcgttggcagagtacatggcctttggctccctgctgaaggaaggcatccacgtgcggctcagcgggcaggatgtggagaggggcacattcagtcaccggcaccatgttctccatgaccaggaggttgaccgcaggacgtgtgtgcctatgaatcatctctggcctgaccaggccccgtacaccgtgtgcaacagctccctctcggagtacggagtcctgggctttgagctgggctatgccatggccagccccaatgccctggtcctctgggaggcccagtttggggacttccacaacacggcccagtgcatcatcgaccagttcatcagcaccggccaggccaagtgggtgcggcataatggcattgtgctgctgctgccccatggcatggaaggcatgggcccagagcactcgtcagcgaggcccgaaaggttcctgcagatgagcaatgatgactcggatgcctaccctgcattcaccaaggacttcgaggtgagccagctctatgactgcaactggatcgtggtcaactgctccacaccggccaactacttccacgtgctgcgccggcagatcctgctgcccttccgcaagccgctgattatcttcacacctaaatctctgctgaggcacccagaggccaagtccagctttgaccaaatggtatccgggaccagcttccagcgggtgattcctgaagatggggccgcagcacgggcccctgagcaggtgcagcggctcatcttctgcacgggaaaggtgtactatgacctggtgaaggagcggagcagccaggacctggaggagaaagtggccatcacgcgcctggagcagatctctccattccccttcgacctgatcaagcaggaggcagagaagtacccaggtgcggagctggcctggtgtcaggaggagcacaagaacatgggctactatgactacatcagcccacgcttcatgaccatcctgaggcgcgcacggcccatatggtatgttggccgggacccagcggctgcaccagccacaggaaacaggaacactcacctggtgtcactgaagaagtttctggatactgccttcaatctccaggcctttgagggcaagacattttag

SEQ ID NO: 77 - DNA, 1056 bp, Homo sapiens
atgggggaaggtgacgccttctgggccccatctgtccttcctcacagcaccctcagcaccttaagccaccaccctcagccacaatttggcagaaggatggagtccaaggtctcagaaggtggcctgaatgtgaccctcaccatccgcctgctgatgcatggaaaggaagttggaagcatcatcgggaagaaaggagaaactgtgaagaagatgcgtgaggagagtggtgcaaggatcaacatctcagagggaaactgcccagagaggattgtgaccatcacaggccccacagacgccatcttcaaggcctttgccatgatcgcatacaagtttgaggaggatatcatcaactccatgagcaacagccctgccaccagcaagcccccagtgacgctgaggctggtggtgcctgccagccagtgtgggtccctgatcggcaaaggaggctccaagatcaaggagatcagggagtccacaggtgcccaggtgcaggtggctggggacatgctgcccaactccacggagcgagcggtgaccatctcggggaccccagatgccatcatccagtgcgtcaagcagatctgtgtggtcatgctggagtccccaccgaaaggtgccaccattccctaccgcccaaagcccgcctccacccctgtcatttttgcaggtggtcaggcctacacaatccagggacagtatgccatccctcacccggatcagttgaccaagctccaccagttggccatgcagcaaaccccctttcctcccctcggacagaccaaccccgctttccccggtctggacgccagcccaccggccagcactcatgagctcaccattcccaatgatctaataggctgcataattggacgccaagggaccaaaatcaatgaaattcgacagatgtctggagctcagatcaaaatcgccaacgccacggaagggtcctcagagcgtcagatcaccatcacggggaccccggccaacatcagccttgcccagtatctcatcaacgccaggctgacgtccgaggtcaccgggatgggcacgctgtaa

SEQ ID NO: 78 - DNA, 3522 bp, Homo sapiens
atagtccctgcccgcgggaggctcgcgcgggaggaggcggcggcgccgcgcaacttcccgggagcccgggccaaagtgagcgcaaagtgctgcccaagttgccgggatggagctgcagagccggcccgaggcgctcgccgtggaactcgcgcgccaccagaacggcgacctcaagaagcagctccacgaaaggcagccgcggatcgccgcgctcagcgacaaacaagctttgggaacgatcactgcagtgcctgtcacgggtcctcaggtcagctccttgcagaggttggccgggcaaggagcggcagtgctacctcaggttaggccaaagactctgattccagacagcctccccgttgccccgggccgggaccggccacccaagcagcccccaacattccagaaggccaccgtggtcagcgtcaagaaccccagcccagccctccccaccgccaacaacactgtcagccatgtgccagcgcccggcagccagccccaggccctcgccgagcccgccgccctcgcctctccgctgagcagtgcgggggtggcctacgccatcatctccacctcccccagcaatgccgccgccatggcccccagcaccgccgtgtctgtggtcagtgacagcatcaaagtccagcccctcctcatcagtgctgacaacaaggtcatcatcattcagcctcaagtgcagacgcagcccgagagcacggcagagtcgcggccgcccacagaggagccatctcagggagctcaggccaccaaaaagaagaaggaagaccggcccccgacccaggagaaccccgagaaaatcgccttcatggtagcgctaggcctggttaccacggaacatttggaagaaatccagagcaagcgacaggagcggaagagaagaagcacagccaaccctgcctacagcggcctcctggagaccgagaggaaacggctggcctccaactatctcaacaaccccctgttcctcacagcgagagccaatgaggacccctgctggaagaacgagatcacccacgatgagcactgtgccgcctgcaagcgaggggccaacctgcagccctgcggcacctgcccgggggcctaccacctcagctgcctggagccgcccctcaagacggcgcccaagggcgtgtgggtgtgccccaggtgccagcagaaggccttaaagaaagacgagggtgtgccctggactgggatgctggccatcgtgcactcttatgtcacccacaagacagtcaaagaagaggagaagcagaagctgctgcaacgaggcagtgagctgcagaacgagcaccagcagctggaggagcgggaccggcggctggcgtcagcagtgcagaaatgcctggagttgaagacaagcctgctggcccgccagaggggcacccagtcatccctggaccgcctgcgggccctcctgagactgatacagggcgagcagctgctccaggtcaccatgacgaccactagccctgccccactgctggccgggccctggaccaagccctcagtggcagccacacaccccaccgtccagcacccccagggccacaactgaccccgagggaccagtcttcatacccacggaaagttattgggaccctgcttacacagcctgggggttctgtcggccttaattcataaacactatgaatttcagacaaaaattaaccagacagaggagaggagggaggaagagctgggcgagaggcctagagccaggaccaggtgggggtgcggccctgtgccctccaaattcacagggggtacctaggagccaggtggggtacgacaggctggggcacacagtctccccccggccacctcggggctgcctgggcctctggcttccaggccctgctctccacggcctccctctggcccgttggaggggcaggctgaggctgtggaggggacaagcacgccccccagaacgcagtctccactgagggcaccgcctattggtgtcctgtgggagggcgagctgagaacacatggactagctgagtggtagcggtagttgggacgagaagcggggtagtggatctaggtagttcctcaatgccccacgctcctaggaggtccccctggggtgggcgggcgggcctggggcactccgtcgcctttgcagaaccacctgggcccctttctgtcagtattattagggttacgaattgcagctgtttaacttgaaagacactgtcggaggtgagcatctgggcgccgggacgctgcagtgatccccgccagagcctgtgcccttcctgctccgtctttggggtcctcaaggctgcctccttccttttgccaatctcttggactcagtttgccgttgatgcgtttttctcatggagtttctgggcagagtggagctgcaaccctgttgtggggggcagcatttggcaggttttctccttggggttgaatcattcaacttaacgactgaagccctttcttgtctcctttggaagagccgataagtattccactcctcccttcttgccagtgcagacactatgccaaaaaataacttcacacttttgtatggcgtttttattgtgagatatttaatgtgaatggttggggggactctggctgacttcctttctgcttctagtagtctctgcttcaaggtacaaatgggaacacctcccctcgggaagcctggccaagctggaagatccggcaggttttttacgagccgggtggagggttggggaggaaagaaagggcggtggctcgggaggttccggccttcggggaccagacttgctgccaagggcttctgcatccagggtgggcagtggcagcttgtcacccttgcccgattcccacatcccagtcctgagggactcagcacaacaggataagcgtccaggagccacgggctcccaccccgagcatatcacatggtgccgaattgcactgaacacgcgtgtgtgcatcgcacgcggccacgaccacagacacgcatgcacacacgcagaggtgcagagcgaggaggccggcaaatcccgcagctgccacggtccctcctgtcattctcacgactccgggagaaactgtgctgtatgatacagatctattttaatacacttaccactgggtgaacaagatttttatattcttttattgatgaacaaagtgaaccgtgtgaggcacacgtcttctatattggctactctgtgccaagtatgcattaccgcgtggcttgcgatgtccatgtcttcagcttccttttctgttggtttggttttcttcgcggatggattgagttacatgttttaacagtgtaatgggaggatctgaaaggttggacccgggaggggtagctgccgatgtgtcttgagattgttaggttttttttggaccaaggaggaccgtccagtgggtagtgaggatagagaaaaagtgtttgtcttaaatacgccaatgtagttttccttctttacaatgtattaaactcgatcgatgatttcaaaaaaaaaaaaaaaaaaaaaaaaa

SEQ ID NO: 79 - DNA, 1914 bp, Homo sapiens
atggcgggcggcgcgggctggtcgggcgcccccgcggctctgctgcgctccgtgcgccgcctgcgcgaggtgttcgaggtgtgcggccgcgaccccgacggcttcctgcgcgtggagcgcgtcgcggcgctcggactgcgcttcggccagggcgaggaggtggaaaaacttgtgaaatatttggatcccaacgacctggggagaatcaacttcaaggacttttgccggggggtgttcgccatgaaagggtgcgaggagctgctgaaggatgtgctgtcggtggagagcgcggggacgctgccgtgcgcgccagagatcccagactgcgtggagcagggcagcgaggtcacaggccccacctttgctgatggcgagctcatccccagggaacccggcttttttcccgaggacgaggaggaggctatgacgctggcgccacctgagggcccccaggagttgtacacagacagccccatggagagcactcagagcctggaggggtctgtcgggagtcctgccgagaaggacgggggacttgggggcctgtttctgccagaagacaagtccctggtccacactccatccatgacgacctcagacctttctacacactccaccacctcgctcatcagcaatgaggagcagtttgaagactatggggagggtgacgatgtggactgtgcccccagcagcccttgccccgatgatgagaccaggaccaacgtctactcggacctggggtcttcggtgtcttccagtgcggggcagacgcctaggaaaatgcggcacgtgtacaacagcgaattgctagatgtttactgctctcaatgctgcaagaaaatcaacctgctcaatgacttggaagcccgactgaaaaacctgaaggccaacagccccaaccgaaagatctccagcacggcctttggacggcagctcatgcacagcagcaacttcagcagcagcaatggcagcaccgaagacctgttccgggacagcattgactcttgcgacaatgacatcacagagaaggtaagcttcctggaaaagaaggtgacagagctggagaatgacagcctgaccaatggggacctgaagagcaagctgaagcaagagaacacacagctggtgcacagggtgcatgagctggaggagatggtgaaggatcaggagaccacggccgagcaggctctggaggaggaggcgcggcgccaccgcgaggcctacggcaagctggagagggagaaggctaccgaggtggagctgctcaatgccagggtgcagcagttggaggaagaaaatacagagcttagaacaacagtgactcggctcaagtctcaaacagagaaactggatgaggagcggcagcgcatgtctgaccgtctggaggacaccagcctgcggctcaaagatgagatggacctgtacaagcgcatgatggacaagctgcgacagaaccgccttgagttccagaaggagcgggaggcgacgcaggagctcatcgaggacttgcggaaggagctggagcacctgcagatgtacaagctggactgcgagcggccaggcaggggccgcagtgcctcctctggcctaggcgagttcaatgccagggcccgcgaggtggagctcgagcacgaggtcaagcggctcaagcaggagaattataagctgcgggatcagaacgacgacttgaatgggcagattttgagcctcagcctctacgaagcaaaaaacctctttgctgcccagactaaagcccagtctctggctgcggagatagacaccgcctcgcgcgatgagctaatggaagccctgaaggagcaggaggagatcaacttccggctgaggcagtacatggacaagattatcctcgccatcctggaccacaatccctccatcctcgagatcaaacactaa

SEQ ID NO: 80 - DNA, 1692 bp, Homo sapiens; identical to SEQ ID NO: 22

SEQ ID NO: 81 - DNA, 2562 bp, Homo sapiens
atggggactcccagggcccagcacccgccgcctccccagctgctgttcctaattctgctgagctgtccctggatccagggtctgcccctgaaggaggaggagatattgccagagcctggaagtgagacccccacggtggcctctgaggccctggctgaactgcttcatggggccctgctgaggaggggcccagagatgggctacctgccagggcctccccttgggcctgagggaggagaggaggagacgacgaccaccatcatcaccacgacaactgttaccactacggtgaccagcccagttctgtgtaataacaacatctccgagggcgaagggtatgtggagtctccagatctggggagccccgtcagccgcaccctggggctcctggactgcacttacagcatccatgtctaccctggctacggcattgagatccaggtgcagacgctgaacctgtcacaggaagaggagctcctggtgctggctggtgggggatccccaggcctggccccccgactcctggccaactcatccatgcttggagaaggacaagtccttcggagcccaaccaaccggctgcttctgcacttccagagcccacgggtcccaaggggcggtggcttcaggatccactatcaggcctacctcctgagctgtggcttccctccccggccggcccatggggacgtgagtgtgacggacctgcaccctgggggcactgccacctttcactgtgattcgggctaccagctgcagggagaggagaccctcatctgcctcaatggcacccggccatcctggaacggtgaaacccccagctgcatggcatcctgtggtggcaccatccacaatgccaccctgggccgcatcgtgtccccagagcctgggggagccgtagggcccaacctcacctgccgttgggtcattgaagcagctgaggggcgccggctgcacctgcactttgaaagggtctcgctggatgaggacaatgaccggctgatggtgcgctcagggggcagccccctatcccccgtgatctatgattcggacatggacgatgtccccgagcggggtctcatcagtgacgcccagtccctctacgtggagctgctgtcagagacacctgccaatcccctgctgttaagccttcgatttgaagcctttgaggaggatcgctgcttcgcccccttcctggcacatggaaatgtcactaccacggaccctgagtatcgcccaggggcactggcaaccttctcgtgcctcccaggatatgccctggagccccctgggccccccaatgccatcgaatgtgtggatcccacagaaccccactggaacgacacagagccggcctgcaaagccatgtgtggaggggagctgtcggaaccagctggcgtggtcctctctcccgactggccccagagctatagcccgggccaagactgcgtgtggggcgtgcacgtccaggaagagaagcgcatcttgctccaagttgagatattgaatgtgcgggaaggggacatgctgacgctgttcgacggggacggtcccagcgcccgagtcttggcccagctgcggggacctcagccgcgccgccgccttctctcctctgggcccgacctcacactgcagtttcaggcaccgcccgggcccccaaatccaggcctgggccagggcttcgtattgcacttcaaagaggtcccgaggaacgacacgtgccccgagctgccacctccggagtggggctggagaacggcatcccacggggacctgatccggggcacggtgctcacctaccagtgcgagcctggctacgagctgctaggctccgacattctcacttgccagtgggacctgtcttggagcgccgcgccgcccgcctgccaaaagatcatgacttgtgctgaccctggcgagattgccaacgggcaccgcaccgcctcggacgccggcttccccgttggctcccacgtccagtaccgctgcctgccagggtacagcctcgagggggcagccatgctcacctgctacagccgggacacaggcacacccaagtggagcgatagggtccccaaatgcgccttgaagtacgagccgtgcctgaacccgggggttcccgagaatggctaccagacgctgtacaagcaccactaccaggcgggcgagtctctgcgcttcttctgctatgagggctttgagcttatcggcgaggtcaccatcacctgtgtgcccggccacccctcccagtggaccagccagcccccactctgcaaagttgcctatgaggagctcctggacaaccgaaaactggaagtgacccagaccacagatccatcacggcagctggaaggggggaacctggccctggccatcctgctgcctctaggcttggtcattgtcctcggcagtggcgtttacatctactacaccaagcttcagggaaagtcccttttcggcttctcgggctcccactcctacagccccatcaccgtggagtcggacttcagcaacccgctgtatgaagctggggatacgcgggagtatgaagtttccatctga

SEQ ID NO: 82 - DNA, 1809 bp, Homo sapiens
atgaacttatctgtattagaaaagatagggtatttctctgtggccaggctggagtacagtggcaccatcttggctcactgcaacttccgcctcctgggttcaaacgattcttctgcctcagcatcccaagtaactgggactacagtatctccagaggcagttggatttttgtcagctgttggggtgtttattatcttgatgctgctcctttttctctatattaataagaagttctgttttgaaaatgttggcgggtttccagatcttggttcagaatacagtacaaggaagaattcacaagataaaatttataattcctacatggacaaagatgagcatggttcatcctctgaaagtgaagatgaagcgctgggtaaatatcatgaggccttatccagaacacacaattccagactaccactggcagattctagacaaaggaactatgcttgggaaacaaggcagaaatacagtcctctatcggcagagtatgatggatacagtagtgaagcatcaatagatgaaggaaactgcattcagagaatgagaagaacacccccgctggatgaattgcagccaccaccatatcaggatgacagtggttctccccatctgtcatgtacaccctcagaaattggggacagtaaatgtgaattttcccactgcagcaacagtccaagatgctcatataacaagtgcccaagtgaaggaagcacaggtcatgaaatagaaagttttcataataaaggatatgaagaagatgttccaagtgacagcactgcagtcctgagccctgaagatatgtcagctcaaggatcatcttcgcagcttcctaaaccttttgatcctgagccagaagctaaatatggcacactggatgtgacttttgactatgactcacaagaacagaagcttctggtaacagtgacagctgtcacagacatcccaacatataacaggacaggtggcaactcatggcaagtacaccttgttcttctacctataaagaaacagagagcaaaaaccagcatccagagaggaccatgccctgtcttcacagaaacatttaaatttaatcatgttgaatctgagatgattggaaattatgcagttcggtttagactgtatggtgtacatcgcatgaaaaaagaaaagattgtgggggaaaagattttttatttaacaaaattgaatcttcaagggaaaatgtcattgcctgtgatattggaaccttcttacaatcattctggctgtgactcccaaatgagcgtgtcagaaatgtcgtgtagtgaaagtacatcctcatgtcagtctcttgaacatggctcagttccagaaattcttattggcctgctttataatgccacaactggaagactatcagcagaagtgataaaaggcagccacttcaaaaatttggcagcaaacagaccacccaatggactgttctgttgtctaaaacacttgataggtggacaggtttatataatccgagatacatatgttaagttaactctactgaattccatgggtcaagagatgtccaaatgcaagacatccatccgcagagggcagccaaatccagtatataaggaaacttttgtctttcaagtggccctatttcagctttctgatgtgacactcatactgtctgtgtataacaaacgcagcatgaaaagaaaagagatgataggctggatttctttaggtctcaacagctctggagaagaagaactcaatcactggactgaaatgaaagagtcaaaaggacagcaagtatgtagatggcatgcgttgctagagtcatga

SEQ ID NO: 83 - DNA, 1677 bp, Homo sapiens
atggccaagaaccgcagggacagaaacagttggggtggattttcggaaaagacatatgaatggagctcagaagaggaggagccagtgaaaaaggcaggaccagtccaagtcctcattgtcaaagatgaccattcctttgagttagatgaaactgcattaaatcggatccttctctcggaggctgtcagagacaaggaggttgttgctgtatctgttgctggagcatttagaaaaggaaaatcattcctgatggacttcatgttgagatacatgtacaaccaggaatcagttgattgggttggagactacaatgaaccattgactggtttttcatggagaggtggatctgagcgagagaccacaggaattcagatatggagtgaaatcttccttatcaataaacctgatggtaaaaaggttgcagtgttattgatggatactcagggaacctttgatagtcagtcaactttgagagattcagccacagtatttgcccttagcacaatgatcagctcaatacaggtatataacttatcccaaaatgtccaggaggatgatcttcagcacctccagcttttcactgagtatggcagactggcaatggaggaaacattcctgaagccatttcagagtctgatatttcttgttcgagactggagtttcccatacgaattttcatatggagccgatggtggtgccaaattcttggaaaaacgcctcaaggtctcagggaaccagcatgaagaactacagaacgtcagaaaacacatccattcctgtttcaccaacatttcctgttttctgctacctcatcctggcttaaaagtagctaccaatccaaactttgatggaaaattgaaagaaatagatgatgaattcatcaaaaacttgaaaatactgattccttggctacttagtcccgagagcctagatattaaagagatcaatgggaataaaatcacctgccggggtctggtggagtacttcaaggcttatataaagatctatcaaggtgaagaattaccacatcccaaatccatgttacaggccacagcagaagctaacaatttagcagccgtggcaactgccaaggacacatacaacaaaaaaatggaagagatttgtggtggtgacaaaccatttctggccccaaatgacttgcagaccaaacacctgcaacttaaggaagaatctgtgaagctattccgaggggtgaagaagatgggtggggaagaatttagccggcgttacctgcagcagttggagagtgaaatagatgaactttacatccaatatatcaagcacaatgatagcaaaaatatcttccatgcagctcgtaccccagccacactgtttgtagtcatctttatcacatatgtgattgctggtgtgactggattcattggtttggacatcatagctagcctatgcaatatgataatgggactgacccttatcaccctgtgcacttgggcatatatccggtactctggagaataccgagagctgggagctgtaatagaccaggtggctgcagctctgtgggaccagggaagtacaaatgaggctttgtacaagctttacagtgcagcagcaacccacagacatctgtatcatcaagctttccctacaccaaagtcggaatctactgaacaatcagaaaagaaaaaaatgtaa

SEQ ID NO: 84 - DNA, 1779 bp, Homo sapiens
cttcacctcactttaccttctcctccagcacaggaactaggaactacggagagagaagccaagggagaggaggaggaggaaactaacgattccctgcccacccccacacccagcaccaccaacaggtgggcaagcttgccgagaaaacgcagagggcatcctgtgagcagcaaacacatctgagcctggaaaagacgcagagaagtaaaagatcaaagtctgattggcaccggctcccattccggctccagcctccaatccgacccccatttcggctgcagcctcggacctagctccggccctcggtctatccggttgcatcctccctccctgttccggatcttatcttgcgccagcgcctactccaggatcccgtagccagacctcaagccatggctggtcccttctcccgtctgctgtccgcccgcccgggactcaggctcctggctttggccggagcggggtctctagccgctgggtttctgctccgaccggaacctgtacgagctgccagtgaacgacggaggctgtatcccccgagcgctgagtacccagacctccgaaagcacaacaactgcatggccagtcacctgaccccagcagtctatgcacggctctgcgacaagaccacacccactggttggacgctagatcagtgtatccagactggcgtggacaaccctggccaccccttcatcaagactgtgggcatggtggctggagatgaggagacctatgaggtatttgctgacctgtttgaccctgtgatccaagagcgacacaatggatatgacccccggacaatgaagcacaccacggatctagatgccagtaaaatccgttctggctactttgatgagaggtatgtattgtcctctagagtcagaactggccgaagcatccgaggactcagtctgcctccagcttgcactcgagcagagcgacgagaggtggaacgtgttgtggtggatgcactgagtggcctgaagggtgacctggctggacgttactataggctcagtgagatgacagaggctgaacagcagcagcttattgatgaccactttctgtttgataagcctgtgtccccgttgctgactgcagcaggaatggctcgagactggccagatgctcgtggaatttggcacaacaatgagaagagcttcctgatctgggtgaatgaggaggatcatacacgggtgatctccatggagaagggtggtaacatgaagagagtgtttgaaagattctgccgaggcctcaaagaggtggagagacttatccaagaacgtggctgggagttcatgtggaatgagcgtttgggatacatcttgacctgtccatctaacctgggcactggacttcgggcaggagtgcacatcaaactgcccctgctaagcaaagatagccgcttcccaaagatcctggagaacctaagactccaaaaacgtggtactggaggagtggacactgctgctacaggcggtgtctttgatatttctaatttggaccgactaggcaaatcagaggtggagctggtgcaactggtcatcgatggagtaaactatttgattgattgtgaacggcgtctggagagaggccaggatatccgcatccccacacctgtcatccacaccaagcattaactccccatcgccagctgatgactcaagattcccaggagttctgctcattctaatgatggcccattctacttgctctggacctgcccccgcatcccctgcctccatcctagtaaagactccttgctatgctgca

SEQ ID NO: 85 - DNA, 1932 bp, Homo sapiens
atggtagatgcaggtggagttgagaacatcacccagcttccccaggagcttcctcagatgatggctgcagcagccgatggtttggggagtatagcgatagacacgacccagctcaacatgtccgtgacagatcccacagcctgggctacagccatgaataacctgggcatggttcccgtagggttgcctggacagcagctcgtgtctgactcaatctgtgtcccaggctttgatccaagcctcaacatgatgactggaatcacccccattaacccaatgataccaggccttggactggtacctcccccaccaccaacagaagtggctgttgtcaaagaaataatccactgcaaaagctgtactctttttcctcaaaatccaaatcttccacctccttccacaagagaacgacctcctgggtgtaagaccgtgtttgtcggaggattaccagaaaatgctactgaggaaattattcaagaagtctttgaacagtgcggtgatattacagcaattcggaaaagcaagaagaatttttgtcacattcgctttgcagaggaattcatggttgataaagccatttacctttctggttataggatgcgattagggtctagcaccgacaaaaaggattcaggccgccttcatgtggactttgcccaggccagggatgacttctatgagtgggaatgcaagcagaggatgcgtgcccgggaggagcggcaccggcgcaagctggaggaggaccggctcaggcccccatccccgcctgccataatgcactactcggagcacgaagccgctctgctggctgaaaagctgaaagatgatagcaagttttcagaggctatcacagtgctgctttcctggattgaacgaggggaagtgaatcggcgctctgcaaaccagttctattccatggtgcagtcggccaacagccacgtccgccggctaatgaatgaaaaagccacccatgagcaagagatggaggaagccaaggagaattttaaaaatgccttaactgggattctcactcaatttgagcagattgtggccgttttcaacgcttctaccagacaaaaagcttgggaccatttctcgaaagcccagcgcaagaacatagacatttggcgaaagcattctgaggagctccggaatgctcaaagtgagcagctcatgggcatccgccgcgaagaagaaatggaaatgtctgatgatgagaactgtgacagccctacaaagaaaatgagagtcgatgaatcagccctggctgcccaggcctacgctctgaaagaggagaatgacagtctccgctggcagctggatgcctacaggaatgaggtggagctgctgaaacaagaaaaagaacagcttttccgaacagaagaaaacctcaccaaggaccagcaactgcagtttctgcagcaaaccatgcaaggcatgcagcagcaattgctaaccatccaggaggagttaaacaacaaaaagtcagaattggaacaagcaaaggaagagcagtcccatacacaagcgttactaaaagtcctgcaggaacaattaaaaggtaccaaggaattggtcgagaccaatggccacagccatgaggattcaaatgaaatcaatgtgttgacagttgcattagtcaaccaagaccgagagaacaatattgagaaaagaagccaaggcttaaaatcagagaaagaagctctgctaataggtatcatatcaacgtttcttcacgtccatccttttggagccaacatagaatatctttggtcatacatgcagcagctggactccaagatatctgcaaatgaaatagaaatgcttttgatgaggctgccacgcatgttcaaacaggaattcacgggtgtgggagccacgctggaaaaaagatggaagctgtgtgcctttgaaggaattaaaactacctaa

SEQ ID NO: 86 - DNA, 903 bp, Homo sapiens
atggagccaccgatggagccgtccggaggggagcaagagcccggagccgtcaggttcctggacctgccctgggaagacgtgctgctcccacacgtcctgaaccgggtcccgctgcgccagctgctccggctgcagcgcgttagccgggccttccggtcgctggtgcagcttcacctggccgggctgcgtcgcttcgatgccgcgcaggtgggtccgcagatcccgcgggccgcattggcccggctgctgcgggatgccgaggggctgcaggagctggcactggcgccgtgtcacgaatggctgtcagacgaggacctggtgccggtgctggcgcggaatccgcagctgcggagtgtggcgttgggcggctgcgggcaactgagtcgccgggcgcttggggctttggccgagggctgcccacgcctgcagcgcctgtcgctcgcgcactgtgactgggtggacgggctggcgctgcgcggcctcgctgatcgctgcccggccctggaggagctggatctcaccgcctgccgccagctcaaggacgaggccatcgtgtacctggcgcagaggcgcggcgctggtctccgcagcctctctctggccgtcaacgccaacgtgggggacgccgcggttcaagagttggctcggaactgcccagaactccaccaccttgacctcaccggctgcctccgcgtcggaagcgacggtgtcaggacattggccgagtactgccccgtgctgcgttcgctgcgggtgcggcactgccaccatgtggcggagtccagcctgagccgcttgcggaagcgcggcgtggacatcgacgtggagccgccgctgcaccaggccctggtgctgctgcaggatatggcgggcttcgcaccttttgtcaacctgcaggtctga

SEQ ID NO: 87 - DNA, 1077 bp, Homo sapiens
atggctgagaggcaggaagagcagagagggagcccgcccttgagggcggaaggcaaggccgacgcggaggttaagctcattctgtaccattggacgcattcgttcagctctcaaaaggtgcgcttggtaattgctgaaaaggcattgaagtgcgaggaacatgatgtaagtctgcccttgagtgagcacaatgagccttggtttatgcgtttgaactcaactggagaagtgcctgtccttatccacggggaaaacataatttgtgaggccactcagatcattgattatcttgaacagactttcctggatgaaagaacacccaggttaatgcctgataaagaaagcatgtattacccacgggtacaacattaccgagagctgcttgactccttgccaatggatgcctatacacatggctgcattttacatcctgagttaactgtggactccatgatcccggcttatgcaactacaaggattcgtagccaaattggaaacacagagtctgagctgaagaaacttgctgaagaaaacccagatttacaagaagcatacattgcaaaacagaaacgacttaaatcaaagctgcttgatcatgacaatgtcaagtatttgaagaaaattcttgatgagttggagaaagtcttggatcaggttgaaactgaattgcaaagaagaaatgaagaaaccccagaagagggccagcaaccttggctctgcggtgaatccttcaccctggcagacgtctcactcgctgtcacattgcatcgactgaagttcctggggtttgcaaggagaaactggggaaacggaaagcgaccaaacttggaaacctattacgagcgtgtcttgaagagaaaaacatttaacaaggttttaggacatgtcaacaatatattaatctctgcagtgctgccaacagcattccgggtggccaagaaaagggccccaaaagttcttggcacgacccttgtggttggtttgcttgcaggagtgggatattttgcttttatgcttttcagaaagaggcttggcagcatgatattagcatttagacccagaccaaattatttctag

SEQ ID NO: 88 - DNA, 444 bp, Homo sapiens
atgtattggcagaactggacccacaatgggagattctggggagcaggagttcacttgtatctgagcaggaagcagtgtgccctgaagaatacctctctgagcaaattccagacctcacacatatgcaagggctctgccttgcagcctcagcaagcgtctcctggtgctagctccttcctgacttgcccggagctcggagtgatgtatttgaagctggtgctgggccagatggtgcaggcagtgaggagagactcaggactgcaacctttcggctccttattcctgctcatcactcagaaaagggcagtactaacccctttcctaaccaagacatggcactccctaagagctcttgtctatagagtttggtccttagaggaaagcagataccttcagcgtgagaagggcttggttgacagttttggggtattatgggaagagtag

SEQ ID NO: 89 - DNA, 2136 bp, Homo sapiens
atggcggagcgagaaagcggcggcctgggagggggggccgcgtccccgcccgccgcctccccgttcctggggctgcacatcgcttcgcctcccaatttcaggctcacccatgacatcagcctggaggagtttgaggatgaagacctctcggagatcactgatgagtgtggcatcagcttacagtgcaaagacaccctgtccttacggcccccgcgcgccgggctgctctctgcgggcggcggcggcgcggggagccggttgcaggccgagatgctgcagatggacctgatcgacgcgacgggggacactcccggggccgaggacgacgaggaggacgacgacgaggagcgcgcggcccggcggccgggagcggggccgcccaaggccgagtccggccaggagccggcgtcccgcggccagggccagagccaaggccagagccagggcccgggcagcggggacacgtaccggcccaagcggcccaccacgctcaacctctttccgcaggtgccgcggtctcaggacacactgaataataattctctgggcaaaaagcacagttggcaggatcgggtgtctcgatcatcctcacccctgaagacaggggagcagacaccaccgcatgaacacatctgcctgagcgatgagctgcccccccagagcggccccgcccccaccacagatcgaggcacctccaccgacagcccttgccgccgcagcacagccacccagatggcacctccgggtggtccccctgctgccccgcctgggggtcggggccactcgcatcgagaccgaatccactaccaggccgatgtgcgactagaggccactgaggagatctacctgaccccagtgcagaggcccccagacgctgcagagcccacctccgccttcctgccgcccactgagagccggatgtcagtcagctccgatccagaccctgccgcctacccctccacggcagggcggccgcacccctccatcagtgaagaggaagagggcttcgactgcctgtcgtccccagagcgggctgagcccccaggcggagggtggcgggggagcctgggggagccgccgccacctccacgggcctctctgagctcggacaccagcgccctgtcctatgactctgtcaagtacacgctggtggtagatgagcatgcacagctggagctggtgagcctgcggccgtgcttcggagactacagtgacgagagtgactctgccaccgtctatgacaactgtgcctccgtctcctcgccctatgagtcggccatcggagaggaatatgaggaggccccgcggccccagccccctgcctgcctctccgaggactccacgcctgatgaacccgacgtccatttctccaagaaattcctgaacgtcttcatgagtggccgctcccgctcctccagtgctgagtccttcgggctgttctcctgcatcatcaacggggaggagcaggagcagacccaccgggccatattcaggtttgtgcctcgacacgaagacgaacttgagctggaagtggatgaccctctgctagtggagctccaggctgaagactactggtacgaggcctacaacatgcgcactggtgcccggggtgtctttcctgcctattacgccatcgaggtcaccaaggagcccgagcacatggcagccctggccaaaaacagtgactgggtggaccagttccgggtgaagttcctgggctcagtccaggttccctatcacaagggcaatgacgtcctctgtgctgctatgcaaaagattgccaccacccgccggctcaccgtgcactttaacccgccctccagctgtgtcctggagatcagcgtgcggggtgtgaagataggcgtcaaggccgatgactcccaggaggccaaggggaataaatgtagccactttttccagttaaaaaacatctctttctgcggatatcatccaaagaacaacaagtactttgggttcatcaccaagcaccccgccgaccaccggtttgcctgccacgtctttgtgtctgaagactccaccaaagccctggcagagtccgtggggagagcattccagcagttctacaagcagtttgtggagtacacctgccccacagaagatatctacctggagtag

SEQ ID NO: 90 - DNA, 5287 bp, Homo sapiens
atggaaataaaaccagaggtatttgacatggtgtttaccccggaggatagattgggaaagcaatgtctgctcctcccgcttctgctcctcgcagcctggaaggtggggagcggccagctccactactccgtacccgaggaggccaaacacggcaccttcgtgggccggatcgcgcaggacctggggctggagctggcggagctggtgccgcgcctgttcaggatggcctccaaagaccgcgaggaccttctggaggtaaatctgcagaatggcattttgtttgtgaattctcggatcgaccgcgaggagctgtgcgggcggagcgcggagtgcagcatccacctggaggtgatcgtggacaggccgctgcaggttttccatgtggacgtggaggtgagggacattaacgacaacccgcccttgttcccggtagaggaacaaagagtgctgatttacgaatctaggctgccagattctgtgtttccactggagggcgcgtccgatgcagatgttggctcaaattccatcttaacctataaactcagttctagcgaatacttcgggctagatgtgaaaataaacagtgatgacaataaacaaattgggctcttattaaagaaatccttggacagagaggaagctcctgcacacaacttattcctgacagccacagatgggggcaaacctgagctcacaggcactgttcagctgctggtcacagtgctggatgtgaatgataatgctcccactttcgaacagtctgaatacgaagtaagaatattcgaaaatgcagacaacggaacaacagttatcagactgaatgcttctgatcgggatgaaggagcgaatggggcaatttcatattcttttaatagccttgttgcagccatggttattgaccactttagcatagatcgaaatacgggagaaatagtgattcggggtaatttggattttgaacaagaaaacttatacaaaatcctcattgacgccacggacaaaggccatcctcccatggcgggtcattgcaccgttttagtgagaattttggataaaaatgataacgtccctgagatagcactgacttccttatccttgcctgtacgtgaagacgctcaatttggtactgtcatcgccctaattagcgtgaacgacctcgattcaggtgccaacgggcaggtgaactgctcgctgacgcctcacgtccctttcaagctggtgtccaccttcaagaattactactcgttggtgctggacagtgccctggaccgcgagagcgtgtcggcctatgagttggtggtaaccgcgcgggacgggggctcgccttcgctgtgggccaccgccagcttgtctgtggaggtggccgacatgaatgacaatgctccggcgttcgcgcagcccgagtacacagtgttcgtgaaggagaacaacccgccgggctgccacatcttcacggtgtctgcgcgagacgcggacgcgcaggagaacgcgctggtgtcctactcgctggtggagcggcgggtgggcgagcgcgcgttgtcgagctacatttcggtgcacgcggagagcggcaaggtgtacgcgctgcagccgctggaccacgaggagctagagctgctgcagtttcaggtgagcgcgcgcgacgcgggcgtgccgcctctgggcagcaacgtgacgctgcaggtgttcgtgctggacgagaacgacaacgcgccggcgctgctggcgcctcgggtgggtggtactggtggtgcagtgagcgagctggtgccgcggtcactgggtgcaggccaagtggtggcgaaggtgcgcgcagttgacgccgactcaggctacaacgcgtggctttcgtatgagctgcagcccccggcaagcagcgctcgcttcccgtttcgcgtggggctgtacacgggcgagatcagcaccactcgtgtcctggacgaagcggactctccgcgccaccggctgctggtgctggtgaaagaccacggtgagccggcgctgacagcgacggccacggttctggtgtcgctggtggagagtggccaggctccaaaggcgtcatcacgggcgtcggtgggcgccgcgggcccagaggcggcgctggtggatgtcaacgtgtacctgatcatcgccatctgcgcggtatccagcctgctggtcctcacgctactgctgtacacagcgctgcggtgctcggcgccacccaccgagggcgcgtgcacggcggacaagcccacgctggtgtgctccagcgcagtggggagctggtcgtactcgcagcagaggcggcagagggtgtgctccggggagggcccacccaagatggatctcatggcctttagccccagcctttcaccttgtcctattatgatgggtaaggcggagaatcaggatttaaatgaagatcatgatgccaaaccacgacagcccaaccctgactggcgttactctgcctccctgagagcaggcatgcacagctctgtgcacctagaggaggctggcattctacgggctggtccaggagggcctgatcagcagtggccaacagtatccagtgcaacaccagaaccagaggcaggagaagtgtcccctccagtcggtgcgggtgtcaacagcaacagctggacctttaaatacggaccaggcaaccccaaacaatccggtcccggtgagttgcccgacaaattcattatcccaggatctcctgcaatcatctccatccggcaggagcctactaacagccaaattgacaaaagtgacttcataaccttcggcaaaaaggaggagaccaagaaaaagaagaaaaagaagaagggtaacaagacccaggagaaaaaagagaaagggaacagcacgactgacaacagtgaccagtgaggtcctcaaatggaaacaagccacttagccagtttttgtaataatggcaaatctctcccatgtagcaattccctgctcctttttcctatctacatgagccctcttagagacctcagaaatctgcagaaagttccctgtgtctgtctagaacgcatttaacaggttttgtcgtaaaagctttactaagtctggtgttaactctttctctccactctggcttgttttcagaacctaaaaagcagacccaagtttcctttctcctccgccgcaaaggagaggcttcccagccccgccagtgagaggttggactctctgccctgtgctccggggatcctgtcttgatgacacttgcagggcaggctgaaaagttttgagattgagcagcttgggagtttgtggccactgggtatgtgtggctaccgcgggtatgcgagtgccagatattggctgagacgagccagcttagactaattggtacaaggaaggcaagaaaacaaagacaaataaacagcggaagttatcagtatggaggggaagtgtaaacttaaagggaccagactttctaaatcttacaactcaagaggtggcagccaccctctaggagacaaaactacccccactgacaaggctttaggagaccctaaagtctgttggctgtgacgtcattatacctaaaatctgcatcatacctgcaagccaacagttcagtgttttaacagagaaccaccctgggaaacagaagcagatctgatgtgtttcctatacatgtcctgtgctcactttattaaaaattcttttgcacacaatgtttatgaaaaggccagatccttttccaatacttatgcaaaagcaaaagaaaaccccgacacctcacctttcgctgtttgttgtttcatagatttatttaaaaaaagagaaagtctatagctataaatctttaaagagaaatatgaatacaattcccctaaactctcctcaaaagagaattcagtctacagccatttaaatgatcattgctgctacagaagtgctttaagagaattgcctgaaacatctgtattatatcggccacctgccaatcacagctttactctttcaggtcactctggggctgcctcttgcatgtattactaaataaaatgatctctctttctctctctctctctcttttctaagaaacaattatgtgcactttgatacacaaccttctctaaccaactatatatcaagacccaaaaattgaagaaaaatattgttttctcatacagtgagcagatttttcaatctactaattctgtgacttgtcttggtgtgctagcctacaccttctctttggtttagttttccttttctataacactctgaattgctaatcttactaacacctatgatgttacctgaaatcaatctcccatatgtatgctgtatgctatgctaagactcctgaaatatacttactctgtgcttgtgtatgtgaatgttaatgcaactattacctagagtgaactttaagctttattgttgaatgtaattccattatatttccttttgtacacctgtgaaaaagtggagtagtgtttttttaaccattgttaatcagcttttgtgtatgaaagacacagtaaaatttctttcttaaatcaagatactggtgattcaaggaattttatttatggtccagccaagagccatctcgtgccaagacttctgctggcaagggaatggataaagctgttttgttctagtaacaattttggaatgaatactgacaatattccatgagggtgtgcaagcacaaattttaccaatctgacctctttgaagttgcagaatgctttgaaattctaatggtatctgaaatatcagctcatagaaagtaacaaaatttgctgtcaccttaaataagacattttaattttgttataatgtacaatttagaagtttgattaattatattatctatttaggcattaatataaaagaggtaggagtctgttatttaaaaaaagcattaaatttaaaaaaaaactgtcttgtctacttttagcttcattctcccatattttgaagggtgtgtaacttcagctctgcaggattgcatggggtaaaacttgttaccaacacatgtgaaccattgctacattgtaggttgtgatcattttgccccactgaagcccatgtatctgaccttacgtgccttttgaactaggagaatcgggctaatttattaatgatgataattataatgtatctgtacagcactttttacatttgcgaagtgctttccaatccatgttagttactagttattacagctgtaaggataaaacacgtcatgtggattcattttgaattggtgctattggtatttcctctgttattgctaataaatgaaaatggtggtatg

SEQ ID NO: 91 - DNA, 1053 bp, Homo sapiens
atggaccagatcgccgtcaccatcgtcggcggccacctcggcctccagctaaaccagaaggccctcaccactttcccggatgtggtgcttgtacgggtacccacaccctcagtgcagtcagacagtgacatcactgtcctgcgacacctggagaagctgggctgccggttggtcaatcgcccacagagcatcttaaattgcatcaacaaattctggacgttccaagaactggctggacatggggtccccatgccagacaccttctcctatggtgggcatgaagacttttcaaaaatgattgatgaagctgagcccctgggctacccagtcgtggtgaagagcacacgaggccaccggggaaaagctgtttttctggcaagagataaacatcacctctctgacatctgccatctgatccgccacgatgtgccctacctgttccagaagtacgtgaaggagtcccatggaaaggacatccgggtggtggtggtagggggccaggtcataggctctatgcttcgctgctccactgatggacggatgcagagcaactgctctctcggtggcgtgggcgtcaagtgtccgctgacagaacaaggcaagcagttggctattcaggtgtccaacatcctaggcatggacttctgtggcattgatctccttatcatggacgatggctcctttgtggtgtgtgaggcaaatgctaatgttggcttcctagcctttgaccaggcatgcaacttagatgtgggtgggatcattgcagactataccatgtccttgctgccaaataggcagactggaaagatggctgtcctcccaggactgtcgagtccaagggagaagaacgagccggatggctgtgcttcagctcagggagttgcagagagcgtctataccatcaacagtgggtctacctctagtgaaagtgagcctgaactgggagagatccgggattcctcagcaagcacaatgggggccccaccctccatgctgcccgaacctggctacaacattaacaacaggattgcttctgagttaaaacttaagtga

SEQ ID NO: 92 - DNA, 1098 bp, Homo sapiens
atgaatatcatggacttcaacgtgaagaagctggcggccgacgcaggcaccttcctcagtcgcgccgtgcagttcacagaagaaaagcttggccaggctgagaagacagaattggatgctcacttagagaacctccttagcaaagctgaatgtaccaaaatatggacagaaaaaataatgaaacaaactgaagtgttattgcagccaaatccaaatgccaggatagaagaatttgtttatgagaaactggatagaaaagctccaagtcgtataaacaacccagaacttttgggacaatatatgattgatgcagggactgagtttggcccaggaacagcttatggtaatgcccttattaaatgtggagaaacccaaaaaagaattggaacagcagacagagaactgattcaaacgtcagccttaaattttcttactcctttaagaaactttatagaaggagattacaaaacaattgctaaagaaaggaaactattgcaaaataagagactggatttggatgctgcaaaaacgagactaaaaaaggcaaaagctgcagaaactagaaattcatctgaacaggaattaagaataactcaaagtgaatttgatcgtcaagcagagattaccagacttctgctagagggaatcagcagtacacatgcccatcaccttcgctgtctgaatgactttgtagaagcccagatgacttactatgcacagtgttaccagtatatgttggacctccagaaacaactgggaagttttccatccaattatcttagtaacaacaatcagacttctgtgacacctgtaccatcagttttaccaaatgcgattggttcttctgccatggcttcaacaagtggcctagtaatcacctctccttccaacctcagtgaccttaaggagtgtagtggcagcagaaaggccagggttctctatgattatgatgcagcaaacagtactgaattatcacttctggcagatgaggtgatcactgtgttcagtgttgttggaatggattcagactggctaatgggggaaaggggaaaccagaagggcaaggtgccaattacctacttagaactgctcaattaa

SEQ ID NO: 93 - DNA, 2133 bp, Homo sapiens
atggaggagatggaagaggagttgaaatgccccgtgtgcggctccttctatcgggagcccatcatcctgccctgctctcacaatttgtgtcaggcgtgcgcccgcaacatcctggtgcagaccccagagtctgaatccccccagagccatcgggccgcgggctccggggtctccgactatgactatctggacctggacaagatgagcctatacagcgaggcggacagcggctatggctcctacggggggttcgccagcgcccccactaccccgtgccagaagtcccccaacggcgtccgcgtgtttcccccggctatgccgccaccggccacccacttgtcaccggccctggccccggtgccccgcaactcctgtatcacctgcccccagtgtcaccgcagcctcatcctggatgaccgggggctccgcggcttccccaagaatcgcgtactggaaggggtaattgaccgctaccagcagagcaaagccgcggccctcaagtgccagctctgcgagaaggcgcccaaggaagccaccgtcatgtgcgaacagtgcgatgtcttctactgcgatccgtgccgcctgcgctgccacccgccccgggggcccctagccaagcaccgcctggtgcccccggcccagggtcgtgtgagccggaggctgagcccacgcaaggtctccacctgcacagaccacgagctggagaaccacagcatgtactgcgtgcaatgcaagatgcccgtgtgctaccagtgcttggaggagggcaaacactccagccacgaagtcaaggctctgggggccatgtggaaactacataagagccagctctcccaggcgctgaacggactgtcagacagggccaaagaagccaaggagtttctggtacagctgcgcaacatggtccagcagatccaggagaacagtgtggagtttgaagcctgtctggtggcccaatgtgatgccctcatcgatgccctcaacagaagaaaagcccagctgctggcccgcgtcaacaaggagcatgagcacaagctgaaggtggttcgagatcagatctctcactgcacagtgaaattgcgccagaccacaggtctcatggagtactgcttggaggtgattaaggaaaatgatcctagtggttttttgcagatttctgacgccctcataagaagagtgcacctgactgaggatcagtggggtaaaggcacactcactccaaggatgaccacggactttgacttgagtctggacaacagccctctgctgcaatccatccaccagctggatttcgtgcaagtgaaagcttcctctccagtcccagcaacccctatcctacagctggaggaatgttgtacccacaacaacagcgctacgttgtcctggaaacagccacctctgtccacggtgcccgccgatggatacattctggagctggatgatggcaacggtggtcaattccgggaggtgtatgtggggaaggagacaatgtgcactgtggatggtcttcacttcaacagcacatacaacgctcgggtcaaggccttcaacaaaacaggagtcagcccgtacagcaagaccctggtcctccaaacgtctgaggtggcctggtttgctttcgaccctggctcggcgcactcggacatcatcctctccaatgacaacctgacagtgacctgtagtagctatgatgaccgggtggtgctagggaagactggcttctccaagggcatccactactgggagctcacggtagatcgctatgacaaccaccctgatcctgcctttggtgtggctcgcatggacgtgatgaaggatgtgatgttaggaaaagacgacaaagcttgggcaatgtatgtggacaataaccggagctggttcatgcacaacaactcgcacaccaacagaactgagggagggatcacaaaaggggccacaattggggtcctcctcgacttaaatagaaaaaacttgacattttttatcaacgatgaacaacaaggtcccatagcatttgataacgtggagggcctcttcttccctgcggtcagcctgaacaggaacgtgcaggtcacgctgcacaccgggctcccagtccccgacttctactccagcagagcatcaatagcctaa

SEQ ID NO: 94 - DNA, 378 bp, Homo sapiens
atgcacaaggaggaacatgaggtggctgtgctggggccaccccccagcaccatccttccaaggtccaccgtgatcaacatccacagcgagacctccgtgcccgaccatgtcgtctggtccctgttcaacaccctcttcttgaactggtgctgtctgggcttcatagcattcgcctactccgtgaagtctagggacaggaagatggttggcgacgtgaccggggcccaggcctatgcctccaccgccaagtgcctgaacatctgggccctgattctgggcatcctcatgaccattggattcatcctgttactggtattcggctctgtgacagtctaccatattatgttacagataatacaggaaaaacggggttactag

SEQ ID NO: 95 - DNA, 6081 bp, Homo sapiens
gccgcgtgcgtcctgcccggagccggcgggacatgcccggagcgcgcgctggagcggcgcgaggaggaggcgaacgtggtgctcaccgggacggtggaggagatcctcaacgtggacccggtgcagcacacgtactcctgcaaggttcgggtctggcggtacttgaagggcaaagacctggtggcccgggagagcctgctggacggcggcaacaaggtggtgatcagcggctttggagaccccctcatctgtgacaaccaggtgtccactggggacaccaggatcttctttgtgaaccctgcacccccatacctgtggccagcccacaagaacgagctgatgctcaactccagcctcatgcggatcaccctgcggaacctggaggaggtggagttctgtgtggaagataaacccgggacccacttcactccagtgcctccgacgcctcctgatgcgtgccggggaatgctgtgcggcttcggcgccgtgtgcgagcccaacgcggaggggccgggccgggcgtcctgcgtctgcaagaagagcccgtgccccagcgtggtggcgcctgtgtgtgggtcggacgcctccacctacagcaacgaatgcgagctgcagcgggcgcagtgcagccagcagcgccgcatccgcctgctcagccgcgggccgtgcggctcgcgggacccctgctccaacgtgacctgcagcttcggcagcacctgtgcgcgctcggccgacgggctgacggcctcgtgcctgtgccccgcgacctgccgtggcgcccccgaggggaccgtctgcggcagcgacggcgccgactaccccggcgagtgccagctcctgcgccgcgcctgcgcccgccaggagaatgtcttcaagaagttcgacggcccttgtgacccctgtcagggcgccctccctgacccgagccgcagctgccgtgtgaacccgcgcacgcggcgccctgagatgctcctacggcccgagagctgccctgcccggcaggcgccagtgtgtggggacgacggagtcacctacgaaaacgactgtgtcatgggccgatcgggggccgcccggggtctcctcctgcagaaagtgcgctccggccagtgccagggtcgagaccagtgcccggagccctgccggttcaatgccgtgtgcctgtcccgccgtggccgtccccgctgctcctgcgaccgcgtcacctgtgacggggcctacaggcccgtgtgtgcccaggacgggcgcacgtatgacagtgattgctggcggcagcaggctgagtgccggcagcagcgtgccatccccagcaagcaccagggcccgtgtgaccaggccccgtccccatgcctcggggtgcagtgtgcatttggggcgacgtgtgctgtgaagaacgggcaggcagcgtgtgaatgcctgcaggcgtgctcgagcctctacgatcctgtgtgcggcagcgacggcgtcacatacggcagcgcgtgcgagctggaggccacggcctgtaccctcgggcgggagatccaggtggcgcgcaaaggaccctgtgaccgctgcgggcagtgccgctttggagccctgtgcgaggccgagaccgggcgctgcgtgtgcccctctgaatgcgtggctttggcccagcccgtgtgtggctccgacgggcacacgtaccccagcgagtgcatgctgcacgtgcacgcctgcacacaccagatcagcctgcacgtggcctcagctggaccctgtgagacctgtggagatgccgtgtgtgcttttggggctgtgtgctccgcagggcagtgtgtgtgtccccggtgtgagcaccccccgcccggccccgtgtgtggcagcgacggtgtcacctacggcagtgcctgcgagctacgggaagccgcctgcctccagcagacacagatcgaggaggcccgggcagggccgtgcgagcaggccgagtgcggttccggaggctctggctctggggaggacggtgactgtgagcaggagctgtgccggcagcgcggtggcatctgggacgaggactcggaggacgggccgtgtgtctgtgacttcagctgccagagtgtcccaggcagcccggtgtgcggctcagatggggtcacctacagcaccgagtgtgagctgaagaaggccaggtgtgagtcacagcgagggctctacgtagcggcccagggagcctgccgaggccccaccttcgccccgctgccgcctgtggcccccttacactgtgcccagacgccctacggctgctgccaggacaatatcaccgcagcccggggcgtgggcctggctggctgccccagtgcctgccagtgcaacccccatggctcttacggcggcacctgtgacccagccacaggccagtgctcctgccgcccaggtgtggggggcctcaggtgtgaccgctgtgagcctggcttctggaactttcgaggcatcgtcaccgatggccggagtggctgtacaccctgcagctgtgatccccaaggcgccgtgcgggatgactgtgagcagatgacggggctgtgctcgtgtaagcccggggtggctggacccaagtgtgggcagtgtccagacggccgtgccctgggccccgcgggctgtgaagctgacgcttctgcgcctgcgacctgtgcggagatgcgctgtgagttcggtgcgcggtgcgtggaggagtctggctcagcccactgtgtctgcccgatgctcacctgtccagaggccaacgctaccaaggtctgtgggtcagatggagtcacatacggcaacgagtgtcagctgaagaccatcgcctgccgccagggcctgcaaatctctatccagagcctgggcccgtgccaggaggctgttgctcccagcactcacccgacatctgcctccgtgactgtgaccaccccagggctcctcctgagccaggcactgccggccccccccggcgccctccccctggctcccagcagtaccgcacacagccagaccacccctccgccctcatcacgacctcggaccactgccagcgtccccaggaccaccgtgtggcccgtgctgacggtgccccccacggcaccctcccctgcacccagcctggtggcgtccgcctttggtgaatctggcagcactgatggaagcagcgatgaggaactgagcggggaccaggaggccagtgggggtggctctggggggctcgagcccttggagggcagcagcgtggccacccctgggccacctgtcgagagggcttcctgctacaactccgcgttgggctgctgctctgatgggaagacgccctcgctggacgcagagggctccaactgccccgccaccaaggtgttccagggcgtcctggagctggagggcgtcgagggccaggagctgttctacacgcccgagatggctgaccccaagtcagaactgttcggggagacagccaggagcattgagagcaccctggacgacctcttccggaattcagacgtcaagaaggattttcggagtgtccgcttgcgggacctggggcccggcaaatccgtccgcgccattgtggatgtgcactttgaccccaccacagccttcagggcacccgacgtggcccgggccctgctccggcagatccaggtgtccaggcgccggtccttgggggtgaggcggccgctgcaggagcacgtgcgatttatggactttgactggtttcctgcgtttatcacgggggccacgtcaggagccattgctgcgggagccacggccagagccaccactgcatcgcgcctgccgtcctctgctgtgacccctcgggccccgcaccccagtcacacaagccagcccgttgccaagaccacggcagcccccaccacacgtcggccccccaccactgcccccagccgtgtgcccggacgtcggcccccggccccccagcagcctccaaagccctgtgactcacagccctgcttccacggggggacctgccaggactgggcattgggcgggggcttcacctgcagctgcccggcaggcaggggaggcgccgtctgtgagaaggtgcttggcgcccctgtgccggccttcgagggccgctccttcctggccttccccactctccgcgcctaccacacgctgcgcctggcactggaattccgggcgctggagcctcaggggctgctgctgtacaatggcaacgcccggggcaaggacttcctggcattggcgctgctagatggccgcgtgcagctcaggtttgacacaggttcggggccggcggtgctgaccagtgccgtgccggtagagccgggccagtggcaccgcctggagctgtcccggcactggcgccggggcaccctctcggtggatggtgagacccctgttctgggcgagagtcccagtggcaccgacggcctcaacctggacacagacctctttgtgggcggcgtacccgaggaccaggctgccgtggcgctggagcggaccttcgtgggcgccggcctgagggggtgcatccgtttgctggacgtcaacaaccagcgcctggagcttggcattgggccgggggctgccacccgaggctctggcgtgggcgagtgcggggaccacccctgcctgcccaacccctgccatggcggggccccatgccagaacctggaggctggaaggttccattgccagtgcccgcccggccgcgtcggaccaacctgtgccgatgagaagagcccctgccagcccaacccctgccatggggcggcgccctgccgtgtgctgcccgagggtggtgctcagtgcgagtgccccctggggcgtgagggcaccttctgccagacagcctcggggcaggacggctctgggcccttcctggctgacttcaacggcttctcccacctggagctgagaggcctgcacacctttgcacgggacctgggggagaagatggcgctggaggtcgtgttcctggcacgaggccccagcggcctcctgctctacaacgggcagaagacggacggcaagggggacttcgtgtcgctggcactgcgggaccgccgcctggagttccgctacgacctgggcaagggggcagcggtcatcaggagcagggagccagtcaccctgggagcctggaccagggtctcactggagcgaaacggccgcaagggtgccctgcgtgtgggcgacggcccccgtgtgttgggggagtccccggttccgcacaccgtcctcaacctgaaggagccgctctacgtagggggcgctcccgacttcagcaagctggcccgtgctgctgccgtgtcctctggcttcgacggtgccatccagctggtctccctcggaggccgccagctgctgaccccggagcacgtgctgcggcaggtggacgtcacgtcctttgcaggtcacccctgcacccgggcctcaggccacccctgcctcaatggggcctcctgcgtcccgagggaggctgcctatgtgtgcctgtgtcccgggggattctcaggaccgcactgcgagaaggggctggtggagaagtcagcgggggacgtggataccttggcctttgacgggcggacctttgtcgagtacctcaacgctgtgaccgagagcgagaaggcactgcagagcaaccactttgaactgagcctgcgcactgaggccacgcaggggctggtgctctggagtggcaaggccacggagcgggcagactatgtggcactggccattgtggacgggcacctgcaactgagctacaacctgggctcccagcccgtggtgctgcgttccaccgtgcccgtcaacaccaaccgctggttgcgggtcgtggcacatagggagcagagggaaggttccctgcaggtgggcaatgaggcccctgtgaccggctcctccccgctgggcgccacgcagctggacactgatggagccctgtggcttgggggcctgccggagctgcccgtgggcccagcactgcccaaggcctacggcacaggctttgtgggctgcttgcgggacgtggtggtgggccggcacccgctgcacctgctggaggacgccgtcaccaagccagagctgcggccctgccccaccccatga

SEQ ID NO: 96 - DNA, 6627 bp, Homo sapiens
ggttccaactatgggagcccacgccccgcccatgccaacatgaatgccaatgcggcagcggggctggcccctgagcacatccccaccccgggggctgccctgtcgtggcaggcggccatcgacgcagcccggcaggctaagctgatgggcagcgctggcaatgcgaccatctccacagtcagctccacgcagcggaagcggcagcaatatgggaaacccaagaagcagggcagcaccacggccacacgcccgccccgagccctgctctgcctgaccctgaagaaccccatccggagggcctgcatcagcattgtcgaatggaaatatcctttaccatttgaaataattattttactgactatttttgccaattgtgtggccttagcgatctatattccctttccagaagatgattccaacgccaccaattccaacctggaacgagtggaatatctctttctcataatttttacggtggaagcgtttttaaaagtaatcgcctatggactcctctttcaccccaatgcctacctccgcaacggctggaacctactagattttataattgtggttgtggggctttttagtgcaattttagaacaagcaaccaaagcagatggggcaaacgctctcggagggaaaggggccggatttgatgtgaaggcgctgagggccttccgcgtgctgcgccccctgcggctggtgtccggagtcccaagtctccaggtggtcctgaattccatcatcaaggccatggtccccctgctgcacatcgccctgcttgtgctgtttgtcatcatcatctacgccatcatcggcttggagctcttcatggggaagatgcacaagacctgctacaaccaggagggcatagcagatgttccagcagaagatgacccttccccttgtgcgctggaaacgggccacgggcggcagtgccagaacggcacggtgtgcaagcccggctgggatggtcccaagcacggcatcaccaactttgacaactttgccttcgccatgctcacggtgttccagtgcatcaccatggagggctggacggacgtgctgtactgggtcaatgatgccgtaggaagggactggccctggatctattttgttacactaatcatcatagggtcattttttgtacttaacttggttctcggtgtgcttagcggagagttttccaaagagagggagaaggccaaggcccggggagatttccagaagctgcgggagaagcagcagctagaagaggatctcaaaggctacctggattggatcactcaggccgaagacatcgatcctgagaatgaggacgaaggcatggatgaggagaagccccgaaacatgagcatgcccaccagtgagaccgagtccgtcaacaccgaaaacgtggctggaggtgacatcgagggagaaaactgcggggccaggctggcccaccggatctccaagtcaaagttcagccgctactggcgccggtggaatcggttctgcagaaggaagtgccgcgccgcagtcaagtctaatgtcttctactggctggtgattttcctggtgttcctcaacacgctcaccattgcctctgagcactacaaccagcccaactggctcacagaagtccaagacacggcaaacaaggccctgctggccctgttcacggcagagatgctcctgaagatgtacagcctgggcctgcaggcctacttcgtgtccctcttcaaccgctttgactgcttcgtcgtgtgtggcggcatcctggagaccatcctggtggagaccaagatcatgtccccactgggcatctccgtgctcagatgcgtccggctgctgaggattttcaagatcacgaggtactggaactccttgagcaacctggtggcatccttgctgaactctgtgcgctccatcgcctccctgctccttctcctcttcctcttcatcatcatcttctccctcctggggatgcagctctttggaggaaagttcaactttgatgagatgcagacccggaggagcacattcgataacttcccccagtccctcctcactgtgtttcagatcctgaccggggaggactggaattcggtgatgtatgatgggatcatggcttatggcggcccctcttttccagggatgttagtctgtatttacttcatcatcctcttcatctgtggaaactatatcctactgaatgtgttcttggccattgctgtggacaacctggctgatgctgagagcctcacatctgcccaaaaggaggaggaagaggagaaggagagaaagaagctggccaggactgccagcccagagaagaaacaagagttggtggagaagccggcagtgggggaatccaaggaggagaagattgagctgaaatccatcacggctgacggagagtctccacccgccaccaagatcaacatggatgacctccagcccaatgaaaatgaggataagagcccctaccccaacccagaaactacaggagaagaggatgaggaggagccagagatgcctgtcggccctcgcccacgaccactctctgagcttcaccttaaggaaaaggcagtgcccatgccagaagccagcgcgtttttcatcttcagctctaacaacaggtttcgcctccagtgccaccgcattgtcaatgacacgatcttcaccaacctgatcctcttcttcattctgctcagcagcatttccctggctgctgaggacccggtccagcacacctccttcaggaaccatattctgttttattttgatattgtttttaccaccattttcaccattgaaattgctctgaagatcctaggcaatgcagactatgtcttcactagtatctttacattagaaattatccttaagatgactgcttatggggctttcttgcacaagggttctttctgccggaactacttcaacatcctggacctgctggtggtcagcgtgtccctcatctcctttggcatccagtccagtgcaatcaatgtcgtgaagatcttgcgagtcctgcgagtactcaggcccctgagggccatcaacagggccaaggggctaaagcatgtggttcagtgtgtgtttgtcgccatccggaccatcgggaacatcgtgattgtcaccaccctgctgcagttcatgtttgcctgcatcggggtccagctcttcaagggaaagctgtacacctgttcagacagttccaagcagacagaggcggaatgcaagggcaactacatcacgtacaaagacggggaggttgaccaccccatcatccaaccccgcagctgggagaacagcaagtttgactttgacaatgttctggcagccatgatggccctcttcaccgtctccaccttcgaagggtggccagagctgctgtaccgctccatcgactcccacacggaagacaagggccccatctacaactaccgtgtggagatctccatcttcttcatcatctacatcatcatcatcgccttcttcatgatgaacatcttcgtgggcttcgtcatcgtcacctttcaggagcagggggagcaggagtacaagaactgtgagctggacaagaaccagcgacagtgcgtggaatacgccctcaaggcccggcccctgcggaggtacatccccaagaaccagcaccagtacaaagtgtggtacgtggtcaactccacctacttcgagtacctgatgttcgtcctcatcctgctcaacaccatctgcctggccatgcagcactacggccagagctgcctgttcaaaatcgccatgaacatcctcaacatgctcttcactggcctcttcaccgtggagatgatcctgaagctcattgccttcaaacccaagggttactttagtgatccctggaatgtttttgacttcctcatcgtaattggcagcataattgacgtcattctcagtgagactaatcactatttctgtgatgcatggaatacatttgacgccttgattgttgtgggtagcattgttgatatagcaatcaccgaggtaaacccagctgaacatacccaatgctctccctctatgaacgcagaggaaaactcccgcatctccatcaccttcttccgcctgttccgggtcatgcgtctggtgaagctgctgagccgtggggagggcatccggacgctgctgtggaccttcatcaagtccttccaggccctgccctatgtggccctcctgatcgtgatgctgttcttcatctacgcggtgatcgggatgcaggtgtttgggaaaattgccctgaatgataccacagagatcaaccggaacaacaactttcagaccttcccccaggccgtgctgctcctcttcaggtgtgccaccggggaggcctggcaggacatcatgctggcctgcatgccaggcaagaagtgtgccccagagtccgagcccagcaacagcacggagggtgaaacaccctgtggtagcagctttgctgtcttctacttcatcagcttctacatgctctgtgccttcctgatcatcaacctctttgtagctgtcatcatggacaactttgactacctgacaagggactggtccatccttggtccccaccacctggatgagtttaaaagaatctgggcagagtatgaccctgaagccaagggtcgtatcaaacacctggatgtggtgaccctcctccggcggattcagccgccactaggttttgggaagctgtgccctcaccgcgtggcttgcaaacgcctggtctccatgaacatgcctctgaacagcgacgggacagtcatgttcaatgccaccctgtttgccctggtcaggacggccctgaggatcaaaacagaagggaacctagaacaagccaatgaggagctgcgggcgatcatcaagaagatctggaagcggaccagcatgaagctgctggaccaggtggtgccccctgcaggtgatgatgaggtcaccgttggcaagttctacgccacgttcctgatccaggagtacttccggaagttcaagaagcgcaaagagcagggccttgtgggcaagccctcccagaggaacgcgctgtctctgcaggctggcttgcgcacactgcatgacatcgggcctgagatccgacgggccatctctggagatctcaccgctgaggaggagctggacaaggccatgaaggaggctgtgtccgctgcttctgaagatgacatcttcaggagggccggtggcctgttcggcaaccacgtcagctactaccaaagcgacggccggagcgccttcccccagaccttcaccactcagcgcccgctgcacatcaacaaggcgggcagcagccagggcgacactgagtcgccatcccacgagaagctggtggactccaccttcaccccgagcagctactcgtccaccggctccaacgccaacatcaacaacgccaacaacaccgccctgggtcgcctccctcgccccgccggctaccccagcacggtcagcactgtggagggccacgggccccccttgtcccctgccatccgggtgcaggaggtggcgtggaagctcagctccaacagggaaaggcacgttccgatgtgtgaggatctggagctcaggagggattcaggctcagcagggactcaggctcactgccttctgctcaggaaagcaaacccctctaggtgccactcccgggagagccaggcagccatggcgggtcaggaggagacgtctcaggatgagacctatgaagtgaagatgaaccatgacacggaggcctgcagtgagcccagcctgctctccacagagatgctctcctaccaggatgacgaaaatcggcaactgacgctcccagaggaggacaagagggacatccggcaatctccgaagaggggtttcctccgctctgcctcactaggtcgaagggcctccttccacctggaatgtctgaagcgacagaaggaccgagggggagacatctctcagaagacagtcctgcccttgcatctggttcatcatcaggcattggcagtggcaggcctgagccccctcctccagagaagccattcccctgcctcattccctaggccttttgccaccccaccagccacacctggcagccgaggctggcccccacagcccgtccccaccctgcggcttgagggggtcgagtccagtgagaaactcaacagcagcttcccatccatccactgcggctcctgggctgagaccacccccggtggcgggggcagcagcgccgcccggagagtccggcccgtctccctcatggtgcccagccaggctggggccccagggaggcagttccacggcagtgccagcagcctggtggaagcggtcttgatttcagaaggactggggcagtttgctcaagatcccaagttcatcgaggtcaccacccaggagctggccgacgcctgcgacatgaccatagaggagatggagagcgcggccgacaacatcctcagcgggggcgccccacagagccccaatggcgccctcttaccctttgtgaactgcagggacgcggggcaggaccgagccgggggcgaagaggacgcgggctgtgtgcgcgcgcggggtcgaccgagtgaggaggagctccaggacagcagggtctacgtcagcagcctgtag

SEQ ID NO: 97 - DNA, 1719 bp, Homo sapiens
atgtcgtaccagggcaagaagagcatcccgcacatcacgagtgaccgactcctcatcaaaggtggacggatcatcaacgatgaccaatccctttatgctgacgtctacctggaggatggacttatcaaacaaataggagagaacttaatcgttcctggtggagtgaagaccattgaagccaacgggcggatggttattcccggaggtattgatgtcaacacgtacctgcagaagccctcccaggggatgactgcggctgatgacttcttccaagggaccagggcggcactggtgggcgggaccacgatgatcattgaccatgttgttcctgaacctgggtccagcctactgacctctttcgagaagtggcacgaagcagctgacaccaaatcctgctgtgattactccctccacgtggacatcacaagctggtacgatggcgttcgggaggagctggaggtgctggtgcaggacaaaggcgtcaattccttccaagtctacatggcctataaggatgtctaccaaatgtccgacagccagctctatgaagcctttaccttccttaagggcctgggagctgtgatcttggtccatgcagaaaatggagatttgatagctcaggaacaaaagcggatcctggagatgggcatcacgggtcccgagggccatgccctgagcagacctgaagagctggaggccgaggcggtgttccgggccatcaccattgcgggccggatcaactgccctgtgtacatcaccaaggtcatgagcaagagtgcagccgacatcatcgctctggccaggaagaaagggcccctagtttttggagagcccattgccgccagcctggggaccgatggcacccattactggagcaagaactgggccaaggctgcggcgttcgtgacttcccctcccctgagcccggaccctaccacgcccgactacttgacctccctactggcctgtggggacttgcaggtcacaggcagcggccactgtccctacagcactgcccagaaggcggtgggcaaggacaactttaccctgatccccgagggtgtcaacgggatagaggagcggatgacggtcgtctgggacaaggcggtggctactggcaaaatggatgagaaccagtttgtcgctgtcaccagcaccaatgcagccaagatctttaacctgtacccaaggaaagggcggattgccgtgggctcggatgccgacgtggtcatctgggaccccgacaagttgaagaccataacagccaaaagtcacaagtcggcggtggagtacaacatcttcgagggtatggagtgccacggctccccactagtggtcatcagccagggcaagatcgtctttgaagacggaaacatcaacgtcaacaagggcatgggccgcttcattccgcggaaggcgttcccggagcacctgtaccagcgcgtcaaaatcaggaataaggtttttggattgcaaggggtttccaggggcatgtatgacggtcctgtgtacgaggtaccagctacacccaaatatgcaactcccgctccttcagccaaatcttcgccttctaaacaccagcccccacccatcagaaacctccaccagtccaacttcagcttatcaggtgcccagatagatgacaacaatcccaggcgcaccggccaccgcatcgtggcgccccctggtggccgctccaacatcaccagcctcggttga

SEQ ID NO: 98 - DNA, 312 bp, Homo sapiens
atggagcggcagcagcagcagcaacagcaactgcgaaacctgcgtgacttcctgttggtctacaatcggatgacagaactctgcttccagcgctgtgtgcccagcttgcaccaccgagctctggacgctgaggaggaggcctgtctgcacagctgtgctgggaagctgatccattccaaccaccgcctcatggccgcttacgtgcagctcatgcctgccctggtacagcgccgcatcgcagactacgaggctgcctcggctgtgccaggcgttgctgctgaacagcctggggtctctccatcaggcagctag

SEQ ID NO: 99 - DNA, 906 bp, Homo sapiens
atgtgcaggatgtccttcaagaaggaaactccacttgccaatgctgcattctgggcagccaggagaggaaacctggcgctgctgaagctgctgttgaacagcggccgggtggacgtggactgcagagacagccatggcaccacactcctgatggttgctgcctacgctggccacatagactgtgtgagggaactggttctgcaaggagcagacatcaatctccagagagagtcaggtacaactgccctattctttgccgcccagcaaggccataatgatgtcgtgagatttctctttggatttggagcatccactgaatttaggaccaaagacgggggcaccgccctgttggctgccagtcagtacgggcacatgcaggtggtggagaccttgctgaagcacggagcaaacatccatgaccaactttatgatggagccactgccctcttcctagctgcccaaggtggttacttggatgttattcgattactgctggcttcaggagcaaaagtcaaccagccaaggcaggacgggacagcgcccctgtggatcgcgtcccagatgggccacagcgaggtggtgcgggtgatgctgctgcgcggagccgaccgcgacgctgcgcggaacgatggcacaacagcattattgaaagcagccaacaaagggtataatgatgtcataaaagagttgcttaaattctcacccactcttggtattttgaagaatgggacatcagcgctccatgcagcagtgctcagtggaaacattaaaacagttgcgctgctcctagaagcaggggcagacccatccctgagaaacaaggccaatgaacttccggcagaactaaccaaaaatgaacgtatattgcgtctcctgagaagtaaagaaggtcccagaaagagctaa

SEQ ID NO: 100 - DNA, 600 bp, Homo sapiens
atgagctctgaaaattgtttcgtagcagagaacagctctttgcatccggagagtggacaagaaaatgatgccaccagtccccatttctcaacacgtcatgaagggtccttccaagttcctgtcctgtgtgctgtaatgaatgtggtcttcatcaccattttaatcatagctctcattgccttatcagtgggccaatacaattgtccaggccaatacacattctcaatgccatcagacagccatgtttcttcatgctctgaggactgggttggctaccagaggaaatgctactttatttctactgtgaagaggagctggacttcagcccaaaatgcttgttctgaacatggtgctactcttgctgtcattgattctgaaaaggacatgaactttctaaaacgatacgcaggtagagaggaacactgggttggactgaaaaaggaacctggtcacccatggaagtggtcaaatggcaaagaatttaacaactggttcaacgttacagggtctgacaagtgtgtttttctgaaaaacacagaggtcagcagcatggaatgtgagaagaatttatactggatatgtaacaaaccttacaaataa

SEQ ID NO: 101 - DNA, 1563 bp, Homo sapiens
atggtcgagggccgcctgctcgttcctgacagaattaacggcacagccaacaagatgaacggagctttggatcactcagaccaaccagacccagatgccattaagatgtttgtcggacagatcccccggtcatggtcggaaaaggagctgaaagaactttttgagccttacggagccgtctaccagatcaacgtcctccgggaccggagtcagaaccctccgcagagtaaaggttgttgtttcgtaacattttatacaagaaaagctgcacttgaggcccagaatgcactgcacaatattaaaactttacctgggatgcatcatcccattcagatgaaacctgcagatagtgaaaagtccaacgctgtggaagacagaaaattgttcataggaatggtatcgaagaaatgtaatgagaacgacatcagggtgatgttctctccatttggccagatagaagaatgccggatcctccggggacctgatgggctgagtcgaggctgtgcgtttgtcacattttctacaagggcaatggcacagaatgcaatcaaagccatgcatcagtctcagaccatggagggctgctcttcacctatcgtggtgaagtttgctgacactcagaaggacaaagagcaaaggcgcctccagcagcagctcgctcagcagatgcagcagctcaacactgccacctgggggaacctgacagggctgggcggactgaccccacagtatctggcgctcctgcagcaggccacctcctccagcaacctgggtgcgttcagcggcattcaacaaatggcaggcatgaatgctttacagttgcagaacctggcgacgctggctgctgctgcagctgcggcccagacctcagccaccagcaccaatgcaaaccctctctctaccacgagcagcgccctgggagccctcacgagtcccgtggctgcttcaacccccaactccactgctggtgcagccatgaactccttgacctctctcgggactctgcaaggactggctggagccactgttggactgaataatattaatgcactagcaggtaccatcaacactcccagaagcaaaaggcttttacttccaaaagataacaacggtatggcggctctgaatggaggacttggcgccacaggcttgacgaatggcacggctggcaccatggacgccctcacccaggcctactcaggaattcaacagtacgcagccgccgcgctgcccactctgtacagccagagcctgctgcagcagcagagcgctgcaggcagccagaaggaaggtccagagggggcaaacctctttatttaccaccttccacaggaatttggagaccaggacattctgcagatgttcatgccttttggaaatgttatctctgctaaagtcttcattgacaaacagaccaatctgagcaagtgctttggttttgttagctacgacaatccagtctctgcacaagctgctatccaagctatgaatggctttcagatcggcatgaaacgcttgaaggtgcagctgaagcgttccaaaaacgacagcaaaccttactga

SEQ ID NO: 102 - DNA, 1251 bp, Homo sapiens
atgactaacgtcctggagggcgactccatggatcaggacgtcgaaagcccagtggccattcaccagccaaagttgcctaagcaggccagggatgacctgccaagacacatcagccgagatcggaccaaaaggaaaatccagaggtacgtgaggaaagacggaaagtgcaatgttcatcacggcaacgtgagggagacctatcgctacctgaccgatatcttcaccacattagtggacctgaagtggagattcaacctattgatttttgtcatggtttacacagtgacctggctcttttttggaatgatctggtggttgatcgcatacatacggggagacatggaccacatagaggacccctcctggactccttgtgttaccaacctcaacgggttcgtctctgcttttttattctcaatagagacagaaaccaccattggttatggctaccgggtcatcacagataaatgcccagagggaattattcttctcttaatccaatctgtgttggggtccattgtcaatgcattcatggtgggatgcatgtttgtaaaaatctctcaacccaagaagagggcagagaccctggtcttttccacccatgcagtgatctccatgcgggatgggaaactgtgcctgatgttccgggtaggggaccttaggaattcccacattgtggaggcttccatcagagccaagttgatcaaatccaaacagacctcggagggggagttcatcccgttgaaccagacggatatcaacgtagggtattacacgggggatgaccgtctgtttctggtgtcaccgctgatcattagccatgaaattaaccaacagagtcctttctgggagatctccaaagcccagctgcccaaagaggaactggaaattgtggtcatcctagaaggaatggtggaagccacagggatgacatgccaagctcgaagctcctacatcaccagtgagatcctgtggggttaccggttcacacctgtcctgaccctggaggacgggttctacgaagttgactacaacagcttccatgagacctatgagaccagcaccccatcccttagtgccaaagagctggccgagttagccagcagggcagagctgcccctgagttggtctgtatccagcaaactcaaccaacatgcagaactggagactgaagaggaagaaaagaacctcgaagagcaaacagaaagaaatggtgatgtggcaaacctggagaatgaatccaaagtttag

SEQ ID NO: 103 - DNA, 387 bp, Homo sapiens
atgccgggaatgaggctggtttgcaggttggcgcatggacattttcccagaaagggacagagacggcgaagtttgacggtctggaaagcagagaccagcagggctgactgcttgggagcaccaaatatccggacagcgcctctcgggaggtccgagaagagaaccgcgatctgtttcagcaccggggctcaggacagttcccagcgggctccgtttcgtctccagaaccctggacagctcctccagcttggaatgcactccctccacctccaaccagagctccccacaactgaccctgccttcttctgcaagctccatttcatcaagggaaacgatccttattgcctcaccatttcccacgtgaagtctgtattgacattctcatag

SEQ ID NO: 104 - DNA, 4746 bp, Homo sapiens
atgcccctggccttctgcggcagcgagaaccactcggccgcctaccgggtggaccagggggtcctcaacaacggctgctttgtggacgcgctcaacgtggtgccgcacgtcttcctactcttcatcaccttccccatcctcttcattggatggggaagtcagagctccaaggtgcacatccaccacagcacatggcttcatttccctgggcacaacctgcggtggatcctgaccttcatgctgctcttcgtcctggtgtgtgagattgcagagggcatcctgtctgatggggtgaccgaatcccaccatctgcacctgtacatgccagccgggatggcgttcatggctgctgtcacctccgtggtctactatcacaacatcgagacttccaacttccccaagctgctaattgccctgctggtgtattggaccctggccttcatcaccaagaccatcaagtttgtcaagttcttggaccacgccatcggcttctcgcagctacgcttctgcctcacagggctgctggtgatcctctatgggatgctgctcctcgtggaggtcaatgtcatcagggtgaggagatacatcttcttcaagacaccgagggaggtgaagcctcccgaggacctgcaagacctgggggtacgcttcctgcagcccttcgtgaatctgctgtccaaaggcacctactggtggatgaacgccttcatcaagactgcccacaagaagcccatcgacttgcgagccatcgggaagctgcccatcgccatgagggccctcaccaactaccaacggctctgcgaggcctttgacgcccaggtgcggaaggacattcagggcactcaaggtgcccgggccatctggcaggcactcagccatgccttcgggaggcgcctggtcctcagcagcactttccgcatcttggccgacctgctgggcttcgccgggccactgtgcatctttgggatcgtggaccaccttgggaaggagaacgacgtcttccagcccaagacacaatttctcggggtttactttgtctcatcccaagagttccttgccaatgcctacgtcttagctgtgcttctgttccttgccctcctactgcaaaggacatttctgcaagcatcctactatgtggccattgaaactggaattaacttgagaggagcaatacagaccaagatttacaataaaattatgcacctgtccacctccaacctgtccatgggagaaatgactgctggacagatctgtaatctggttgccatcgacaccaatcagctcatgtggtttttcttcttgtgcccaaacctctgggctatgccagtacagatcattgtgggtgtgattctcctctactacatactcggagtcagtgccttaattggagcagctgtcatcattctactggctcctgtccagtacttcgtggccaccaagctgtctcaggcccagcggagcacactggagtattccaatgagcggctgaagcagaccaacgagatgctccgcggcatcaagctgctgaagctgtacgcctgggagaacatcttccgcacgcgggtggagacgacccgcaggaaggagatgaccagcctcagggcctttgccatctatacctccatctccattttcatgaacacggccatccccattgcagctgtcctcataactttcgtgggccacgtcagcttcttcaaagaggccgacttctcgccctccgtggcctttgcctccctctccctcttccatatcttggtcacaccgctgttcctgctgtccagtgtggtccgatctaccgtcaaagctctagtgagcgtgcaaaagctaagcgagttcctgtccagtgcagagatccgtgaggagcagtgtgccccccatgagcccacacctcagggcccagccagcaagtaccaggcggtgcccctcagggttgtgaaccgcaagcgtccagcccgggaggattgtcggggcctcaccggcccactgcagagcctggtccccagtgcagatggcgatgctgacaactgctgtgtccagatcatgggaggctacttcacgtggaccccagatggaatccccacactgtccaacatcaccattcgtatcccccgaggccagctgactatgatcgtggggcaggtgggctgcggcaagtcctcgctccttctagccgcactgggggagatgcagaaggtctcaggggctgtcttctggagcagcagccttcctgacagcgagataggagaggaccccagcccagagcgggagacagcgaccgacttggatatcaggaagagaggccccgtggcctatgcttcgcagaaaccatggctgctaaatgccactgtggaggagaacatcatctttgagagtcccttcaacaaacaacggtacaagatggtcattgaagcctgctctctgcagccagacatcgacatcctgccccatggagaccagacccagattggggaacggggcatcaacctgtctggtggtcaacgccagcgaatcagtgtggcccgagccctctaccagcacgccaacgttgtcttcttggatgaccccttctcagctctggatatccatctgagtgaccacttaatgcaggccggcatccttgagctgctccgggacgacaagaggacagtggtcttagtgacccacaagctacagtacctgccccatgcagactggatcattgccatgaaggatggcaccatccagagggagggtaccctcaaggacttccagaggtctgaatgccagctctttgagcactggaagaccctcatgaaccgacaggaccaagagctggagaaggagactgtcacagagagaaaagccacagagccaccccagggcctatctcgtgccatgtcctcgagggatggccttctgcaggatgaggaagaggaggaagaggaggcagctgagagcgaggaggatgacaacctgtcgtccatgctgcaccagcgtgctgagatcccatggcgagcctgcgccaagtacctgtcctccgccggcatcctgctcctgtcgttgctggtcttctcacagctgctcaagcacatggtcctggtggccatcgactactggctggccaagtggaccgacagcgccctgaccctgacccctgcagccaggaactgctccctcagccaggagtgcaccctcgaccagactgtctatgccatggtgttcacggtgctctgcagcctgggcattgtgctgtgcctcgtcacgtctgtcactgtggagtggacagggctgaaggtggccaagagactgcaccgcagcctgctaaaccggatcatcctagcccccatgaggttttttgagaccacgccccttgggagcatcctgaacagattttcatctgactgtaacaccatcgaccagcacatcccatccacgctggagtgcctgagccgctccaccctgctctgtgtctcagccctggccgtcatctcctatgtcacacctgtgttcctcgtggccctcttgcccctggccatcgtgtgctacttcatccagaagtacttccgggtggcgtccagggacctgcagcagctggatgacaccacccagcttccacttctctcacactttgccgaaaccgtagaaggactcaccaccatccgggccttcaggtatgaggcccggttccagcagaagcttctcgaatacacagactccaacaacattgcttccctcttcctcacagctgccaacagatggctggaagtccgaatgtacatcggtgcatgtgtggtgctcatcgcagcggtgacctccatctccaactccctgcacagggagctctctgctggcctggtgggcctgggccttacctacgccctaatggtctccaactacctcaactggatggtgaggaacctggcagacatggagctccagctgggggctgtgaagcgcatccatgggctcctgaaaaccgaggcagagagctacgaggggctcctggcaccatcgctgatcccaaagaactggccagaccaagggaagatccagatccagaacctgagcgtgcgctacgacagctccctgaagccggtgctgaagcacgtcaatgccctcatcgcccctggacagaagatcgggatctgcggccgcaccggcagtgggaagtcctccttctctcttgccttcttccgcatggtggacacgttcgaagggcacatcatcattgatggcattgacatcgccaaactgccgctgcacaccctgcgctcacgcctctccatcatcctgcaggaccccgtcctcttcagcggcaccatccgatttaacctggaccctgagaggaagtgctcagatagcacactgtgggaggccctggaaatcgcccagctgaagctggtggtgaaggcactgccaggaggcctcgatgccatcatcacagaaggcggggagaatttcagccagggacagaggcagctgttctgcctggcccgggccttcgtgaggaagaccagcatcttcatcatggacgaggccacggcttccattgacatggccacggaaaacatcctccaaaaggtggtgatgacagccttcgcagaccgcactgtggtcaccatcgcgcatcgagtgcacaccatcctgagtgcagacctggtgatcgtcctgaagcggggtgccatccttgagttcgataagccagagaagctgctcagccggaaggacagcgtcttcgcctccttcgtccgtgcagacaagtga

SEQ ID NO: 105 - DNA, 1536 bp, Homo sapiens
atgggccaaggggacgagagcgagcgcatcgtgatcaacgtgggcggcacgcgccaccagacgtaccgctcgaccctgcgcacgctgcccggcacgcggctcgcctggctggcggagcccgacgcccacagccacttcgactatgacccgcgtgctgacgagttcttcttcgaccgccaccccggcgtcttcgcgcacatcctgaactactaccgcacgggcaagctgcactgcccagccgacgtgtgcgggccgctctacgaggaggagctggccttctggggcatcgacgagaccgacgtggagccctgctgctggatgacgtaccgccagcaccgcgacgccgaggaggctctggacagcttcggcggcgctcctctggacaacagcgccgacgacgcggacgccgacggccctggcgactcgggcgacggcgaggacgagctggagatgaccaagcgcctggcgctcagtgactccccggatggccggcctggcggcttttggcgccgctggcagccgcgcatctgggcgctcttcgaggacccgtactcgtcccgctacgcgcggtatgtggccttcgcttccctcttcttcatcctggtctccatcaccaccttctgcctggagacccacgagcgcttcaaccccatcgtgaacaagacggagatcgagaacgttcgcaatggcacgcaagtgcgctactaccgggaggccgagacggaggccttccttacctacatcgagggcgtctgtgtggtctggttcaccttcgagttcctcatgcgtgtcatcttctgccccaacaaggtagagttcatcaagaactcgctcaacatcattgactttgtggccatcctgcccttctacctggaggtggggctgagcggcctgtcctccaaggcagccaaggacgtgctgggcttcctgcgcgtcgtccgcttcgtgcgcatcttgcgcatctttaagctgacccgccactttgtgggcctgcgggtcctgggccacacgctccgagccagcaccaacgagttcctgctgctcatcatcttcctggccttgggcgtgctgatcttcgccaccatgatctactacgccgagaggataggggcacagcccaatgaccccagcgccagtgagcacacgcactttaagaacatccccatcggcttctggtgggccgtggtcaccatgacgaccctgggctatggagacatgtacccgcagacgtggtccggcatgctggtgggggctctgtgtgcgctggcgggcgtgctcaccatcgccatgcccgtgcccgtcatcgtgaacaatttcgggatgtattactccttagccatggctaagcagaaactaccaaagaaaaaaaagaagcatattccgcggccaccgcagctgggatctcccaattattgtaaatctgtcgtaaactctccacaccacagtactcagagtgacacatgtccgctggcccaggaagaaattttagaaattaacagagcaggtaggaaacctcttagaggcatgtcgatctga

SEQ ID NO: 106 - DNA, 1638 bp, Homo sapiens
atgttcagctggctgggtacggacgaccgccggaggaaggaccccgaggttttccagacggtgagtgaggggctcaagaaactctacaagagcaagctgctgcccttggaagagcattaccgcttccacgagttccactcgcccgccctggaggatgccgacttcgacaacaagcccatggttctgctggtgggccagtactccactgggaagaccaccttcatcaggtacctgctggaacaggacttcccaggcatgaggattgggcctgagcccaccacagactccttcattgcggtgatgcagggagacatggaggggatcatccctgggaacgccctggtggtggatcccaagaaacccttcaggaaactcaacgcctttggcaacgccttcttgaacaggttcgtgtgtgcccagctacctaaccctgtgctggagagcatcagcgtcatcgacacaccagggatcctctctggggagaagcagaggatcagccgggggtatgactttgcagctgtccttgagtggtttgccgagcgggttgaccgcatcattctgctcttcgatgcccacaaactggacatctctgatgagttctcagaagtcatcaaagccctcaagaaccacgaggacaagatgcgagtggtgctgaacaaagctgaccagatcgagacgcagcagctgatgcgggtgtacggggccctcatgtggtccttggggaagatcgtgaacaccccagaggtgatccgggtctacatcggctccttctggtcccaccccctcctcatccctgacaaccggaagctctttgaggctgaggaacaggacctattcagggacatccagagtctgccccgaaatgctgccctgcgcaagctcaacgacctcatcaaaagggccaggctggccaaggtccacgcctacatcatcagctctctgaagaaggagatgccctcggtgttcgggaaggacaacaagaagaaggagctggtcaacaacctggccgagatctatggccggatcgagcgggagcaccagatctcacctggggacttccccaatctgaagaggatgcaggaccagctgcaggcccaggactttagcaagttccagccgctgaagagcaagctgctggaggtagtggacgacatgctggcccatgacattgcccagctcatggtgctagtgcgccaggaggagtcacagcggcccatccagatggtgaagggcggagcgttcgagggcaccctgcacggcccctttgggcatggctatggggagggggctggagaaggtatcgatgatgctgagtgggtggtggccagggacaagcccatgtacgacgagatcttctacaccctgtcaccggtggatggcaagatcacaggcgctaatgccaagaaggagatggtgcgctccaagctgcccaacagtgtgctgggcaagatctggaagctggccgacattgacaaggatggcatgctggacgacgacgagtttgcactggccaaccacctcatcaaagtcaagctggaggggcacgagccaacgagctgcctgcccacctcctgcccccgtccaagaggaaagttgccgagtgatggggtggggggacattcagacgggcagtgttag

SEQ ID NO: 107 - DNA, 1461 bp, Homo sapiens
atgtatataaagatggccacgttagcaaacggacaggctgacaacgcaagcctcagtaccaacgggctcggcagcagcccgggcagtgccgggcacatgaacggattaagccacagcccggggaacccgtcgaccattcccatgaaggaccacgatgccatcaagctgttcattgggcagatcccccgcaacctggatgagaaggacctcaagcccctcttcgaggagtttggcaaaatctacgagcttacggttctgaaggacaggttcacaggcatgcacaaaggctgcgccttcctcacctactgcgagcgtgagtcagcgctgaaggcccagagcgcgctgcacgagcagaagactctgcccgggatgaaccggccgatccaggtgaagcctgcggacagcgagagccgaggaggtagtagctgcctgcgccagcccccttcacaagatagaaaactcttcgtgggcatgctcaacaagcaacagtccgaggacgacgtgcgccgccttttcgaggcctttgggaacatcgaggagtgcaccatcctgcgcgggcccgacggcaacagcaaggggtgcgcctttgtgaagtactcctcccacgccgaggcgcaggccgccatcaacgcgctacacggcagccagaccatgccgggagcctcgtccagtctggtggtcaagttcgccgacaccgacaaggagcgcacgatgcggcgaatgcagcagatggctggccagatgggcatgttcaaccccatggccatccctttcggggcctacggcgcctacgctcaggcactgatgcagcagcaagcggccctgatggcatcagtcgcgcagggcggctacctgaaccccatggctgccttcgctgccgcccagatgcagcagatggcggccctcaacatgaatggcctggcggccgcacctatgaccccaacctcaggtggcagcacccctccgggcatcactgcaccagccgtgcctagcatcccatcccccattggggtgaatggcttcaccggcctccccccacaggccaatgggcaacctgctgcggaagctgtgttcgccaatggcatccacccctacccagcacagagccccaccgccgcggaccccctgcagcaggcctacgccggagtgcagcagtatgcaggtccagctgcctaccctgctgcctatggtcagataagccaggcctttcctcagccgcctccaatgatcccccagcagcagagagaagggcccgagggctgtaacctgttcatctaccatctgccccaggagtttggggacgctgagctgatgcagatgttcctccctttcggcttcgtgagcttcgacaacccggccagcgcgcagaccgccatccaggccatgaacggcttccagatcggcatgaagaggctcaaggtgcagctgaagcggcccaaagacgccaatcgcccgtactga

SEQ ID NO: 108 - DNA, 1191 bp, Homo sapiens
atgaagaactatgagagcaagaagtactcggatcctagtcagccaggcaatacagtacttcacccaggaactagactaatacaaaagctacacacatccacttgctggctgcaagaagttcctggcaaacctcagctggagcaagccacaaaacatccacaggtgacaagccctcaggccacaaaagaaactggcatggagattaaagaaggcaaacaatcttatagacaaaaaatcatggatgaactaaaatattattacaatggattctacttactttggattgacgccaaagttgctgccagaatggtttggaggctgttgcatggacaggtcctgaccagacgagagagacgaagggaagaaaaacagaaaaagaaaatggctgtaaagttggaactagcaaaatttcttcaagaaaccatgacagaaatggcaaggaggaacagagccaagatgggcgatgcctctacacagctctcatcctacgtgaagcaggtccagacaggccacaagcccagcacaaaggagatagttcgcttctccaaactatttgaggaccagctggccctggaacacttagatcgccctcagctggttgccctttgcaaactgctggaattgcagacatttggaaccaacaacctgctccgctttcagctcctgatgaaactgaagtctataaaagcagatgatgaaataattgccaaggaaggggtgacagcattgagtgtatcagaactacaggctgcctgtagggcccgagggatgagatcactgggtctcacggaggaacaactgcgacaacagctcacggagtggcaggacctccacctgaaggagaacgtccctccttcccttttgctcctgtcccgcaccttctacctgatagatgtgaagcccaagccgattgagataccactcagtggggaggctccaaagactgatattcttgtggaattacctactttcactgaatctaaagagaacatggtggatcttgcacctcaactgaagggaactaaggatgaagactttatacagccgccaccagttacatcatcacccataacaccatcaacacctatttcattacctaaaggacccatcacttcttctgaagaacctacactccaggccaaatcacaaatgacggcccagaacagcaaggctagttcaaaaggagcataa

SEQ ID NO: 109 - DNA, 2463 bp, Homo sapiens
atgtggagctggaagtgcctcctcttctgggctgtgctggtcacagccacactctgcaccgctaggccgtccccgaccttgcctgaacaagcccagccctggggagcccctgtggaagtggagtccttcctggtccaccccggtgacctgctgcagcttcgctgtcggctgcgggacgatgtgcagagcatcaactggctgcgggacggggtgcagctggcggaaagcaaccgcacccgcatcacaggggaggaggtggaggtgcaggactccgtgcccgcagactccggcctctatgcttgcgtaaccagcagcccctcgggcagtgacaccacctacttctccgtcaatgtttcagatgctctcccctcctcggaggatgatgatgatgatgatgactcctcttcagaggagaaagaaacagataacaccaaaccaaaccgtatgcccgtagctccatattggacatccccagaaaagatggaaaagaaattgcatgcagtgccggctgccaagacagtgaagttcaaatgcccttccagtgggaccccaaaccccacactgcgctggttgaaaaatggcaaagaattcaaacctgaccacagaattggaggctacaaggtccgttatgccacctggagcatcataatggactctgtggtgccctctgacaagggcaactacacctgcattgtggagaatgagtacggcagcatcaaccacacataccagctggatgtcgtggagcggtcccctcaccggcccatcctgcaagcagggttgcccgccaacaaaacagtggccctgggtagcaacgtggagttcatgtgtaaggtgtacagtgacccgcagccgcacatccagtggctaaagcacatcgaggtgaatgggagcaagattggcccagacaacctgccttatgtccagatcttgaagactgctggagttaataccaccgacaaagagatggaggtgcttcacttaagaaatgtctcctttgaggacgcaggggagtatacgtgcttggcgggtaactctatcggactctcccatcactctgcatggttgaccgttctggaagccctggaagagaggccggcagtgatgacctcgcccctgtacctggagatcatcatctattgcacaggggccttcctcatctcctgcatggtggggtcggtcatcgtctacaagatgaagagtggtaccaagaagagtgacttccacagccagatggctgtgcacaagctggccaagagcatccctctgcgcagacaggtgtctgctgactccagtgcatccatgaactctggggttcttctggttcggccatcacggctctcctccagtgggactcccatgctagcaggggtctctgagtatgagcttcccgaagaccctcgctgggagctgcctcgggacagactggtcttaggcaaacccctgggagagggctgctttgggcaggtggtgttggcagaggctatcgggctggacaaggacaaacccaaccgtgtgaccaaagtggctgtgaagatgttgaagtcggacgcaacagagaaagacttgtcagacctgatctcagaaatggagatgatgaagatgatcgggaagcataagaatatcatcaacctgctgggggcctgcacgcaggatggtcccttgtatgtcatcgtggagtatgcctccaagggcaacctgcgggagtacctgcaggcccggaggcccccagggctggaatactgctacaaccccagccacaacccagaggagcagctctcctccaaggacctggtgtcctgcgcctaccaggtggcccgaggcatggagtatctggcctccaagaagtgcatacaccgagacctggcagccaggaatgtcctggtgacagaggacaatgtgatgaagatagcagactttggcctcgcacgggacattcaccacatcgactactataaaaagacaaccaacggccgactgcctgtgaagtggatggcacccgaggcattatttgaccggatctacacccaccagagtgatgtgtggtctttcggggtgctcctgtgggagatcttcactctgggcggctccccataccccggtgtgcctgtggaggaacttttcaagctgctgaaggagggtcaccgcatggacaagcccagtaactgcaccaacgagctgtacatgatgatgcgggactgctggcatgcagtgccctcacagagacccaccttcaagcagctggtggaagacctggaccgcatcgtggccttgacctccaaccaggagtacctggacctgtccatgcccctggaccagtactcccccagctttcccgacacccggagctctacgtgctcctcaggggaggattccgtcttctctcatgagccgctgcccgaggagccctgcctgccccgacacccagcccagcttgccaatggcggactcaaacgccgctga

SEQ ID NO: 110 - DNA, 2463 bp, Homo sapiens; identical to SEQ ID NO: 109

SEQ ID NO: 111 - DNA, 13461 bp, Homo sapiens
atgcggctcgcggaggagcgggccgcgctcgcggcggagaacgcggatggggaacccggcgccgaccgacgactgcgactcctggggacctacgtggccatgagcctgcggccggctgcgggcgcctgggagcgttgcgcggggagtgctgaggcggagcagctgctccaggccttcctgggccgcgatgctgccgaggggccgcggccgctgctggtggtgcggcccgggcccaggggcctggcaatacgccccgggctggaggtgggacctgagtcgggcctggctggcgctaaggcgctttttttccttcgcaccgggcccgagcctccagggcccgacagcttccgcggcgcagtggtctgcggggacctgcccgcggcacctctggagcacctagccgcgctgttctcggaggttgttctacccgtcctggccaatgagaagaatcgcctaaactggccccacatgatatgtgaggatgtcaggcggcacgcccacagcctccaatgtgacctctcagttatacttgagcaagtgaagggaaaaactttgctgcctcttccagcaggctcagaaaaaatggagtttgcggattccaaaagtgagacagtcttggattctatagataagtcagtcatctatgccattgagtctgcagtgatcaaatggagctaccaagtccaggtggtactcaagagagagtcttcccagccactcttacaaggggagaatcccacccctaaggtggagttggagttctggaagagcaggtatgaagatctgaaatacatctataatcaactgagaacaataacggtgaggggcatggccaagctcctggacaagcttcagagtagctactttccagctttcaaagccatgtacagagatgttgttgcagctctagcagaggcacaggacatccatgtgcacctgataccgctccagcgccacctggaagctctggagaatgcagaatttccggaggtgaagccccagctgcggcccctgctccacgtggtctgtctgatttgggccacatgcaagtcctaccgctccccgggaaggctgactgtgctgctccaggagatttgcaaccttctcatccagcaggcctctaattatctcagcccagaagacctgctgagaagtgaggtagaagaaagtcagagaaaactgcaagtggtctcagacactttgagcttcttcaagcaagagtttcaggacagaagggagaatctccacacttacttcaaagagaaccaggaagtcaaggaatgggatttccagtcttctttggtctttgtgcgattggatggcttcctgggacaactgcacgtggtggagggtcttctgaagacggccctggatttccacaaactgggaaaggtggagttcagcggcgtcagagggaatgctctgagtcagcaggtccagcaaatgcatgaagaatttcaagagatgtacaggcttctctcaggatcctcctccgactgcctgtacctccaaagcacggactttgaaaatgacgtctctgaatttaaccagaaagtagaagatcttgaccgaagattggggactatctttattcaagcttttgatgatgcacctggcttggagcatgcctttaagctgctagacatagcaggaaacctccttgaaagaccgctggtagcgagggatacatctgataaatacctggtcctcatccaaatgttcaacaaagatctggatgcagtgaggatgatctacagtcagcacgtccaggaggaagcagaacttgggttctccccggtgcacaagaacatgcccaccgtggctggcggcctccgctgggcacaggagctgaggcagcgcatccagggtcctttcagcaactttggacgcatcacacacccttgcatggaatctgcagaaggaaagcgaatgcaacaaaaatatgaagatatgctgtcattgctagaaaagtatgagacaagactttatgaggattggtgccggacagtatcagagaagtcacagtacaatctttcccaaccacttctaaaacgtgacccagagacgaaggagatcactatcaactttaacccacagctgatttcagtgctgaaagaaatgagctatcttgaacccagagagatgaaacacatgcctgagacagcagcagccatgttctcctccagggatttctatcggcagcttgtggctaatttagagttgatggcaaattggtacaacaaggttatgaaaactctgctggaggtggaatttccattagtggaggaagagctgcaaaatattgatctccgcctcagagcagcagaggagactttgaactggaaaacagaaggcatttgcgattatgtcactgaaatcaccagtagtattcatgatcttgaacaaagaattcagaaaactaaagacaatgtggaagagatccaaaacatcatgaaaacatgggtgactccaatatttaagacaaaagatggaaaaagggaatcccttctttctctggatgatcggcatgatcgaatggaaaaatattacaatctcatcaaggaatctggccttaagatccacgcccttgttcaggaaaacctgggtctattttcagcagacccaacctccaatatctggaagacttatgttaactctattgacaatttgttgctgaatggattctttcttgccattgagtgctccctcaagtatcttctggaaaatactgagtgtaaggcaggacttaccccaatatttgaagcacaactgagtctagccatcccagagctagttttctatccgtctctggagtctggagtgaaggggggtttctgtgacattgttgagggtctcatcaccagcatttttaggataccatctctggtgccacggctttccccacaaaatggctctcctcactatcaggtcgacctggacggtataccagatttggcaaacatgcggcgcacactcatggagagagtccagagaatgatgggcctctgctgtggctatcagagcaccttcagccagtattcgtacctctatgtggaggaccggaaggaggttctgggtcagtttctgctgtacgggcacatcctcactccggaagaaattgaagaccatgtggaagatggcatcccagagaaccctcccctcctttctcagtttaaagtgcaaatcgactcctatgaaacgctctatgaagaggtgtgcaggctggaacccatcaaggtgtttgacggctggatgaaaattgatattcgaccctttaaggcatctctgctgaatattattaagaggtggagcctcctgttcaaacagcatcttgtggaccacgtcactcacagcttggccaacctggatgcgtttataaagaagagtgagagcggcttactcaagaaagttgaaaaaggagatttccaaggcttggttgagatcatgggacaccttatggctgttaaagaacggcagagtaacactgatgagatgtttgagcccttaaagcagactattgaattgctgaagacctatgaacaagaattgccagaaacagtgtttaagcagctggaggagctgcctgagaaatggaacaacataaaaaaggtggccattactgtgaagcagcaggtggccccactgcaggcaaatgaagtgacactcctccgccagaggtgcacagccttcgatgcagaacagcagcaattctgggagcaattccacaaagaagccccgttcaggtttgatagcatccaccctcatcaaatgctggatgccaggcacatcgagatccagcagatggaatccactatggcctccatttctgagtctgccagcttatttgaagtcaatgtccctgactataagcagctgaggcagtgcaggaaggaggtctgccagctgaaggagctctgggacaccattggaatggtgacctccagcatccatgcctgggagaccacaccctggaggaatatcaacgtggaagccatggagttggagtgcaaacagtttgcccggcatatccgaaacctggacaaggaggtcagggcctgggatgcattcacaggcctggaaagcactgtgtggaacacgctgagctccctgagggcagtagctgagctgcagaatccagccatccgggagcggcactggaggcagctgatgcaggccaccggtgtgagcttcactatggaccaggacaccaccctagcgcacctgctgcagctccagctgcaccactatgaggatgaggtccggggcattgtggacaaagctgcaaaagagatgggtatggagaaaaccttaaaggagctgcagactacctgggctggcatggaattccagtatgagccccacccacggaccaatgtccccctcctgtgctctgatgaggacctcatagaggttctggaggataatcaagttcaacttcagaacctggtgatgtccaagtatgttgctttcttcttggaggaggtgtcgggctggcagaagaagctgtccacagtggacgctgtcatctctatctggtttgaagtgcagcgaacatggactcacctggaaagcatattcactggatctgaagatattcgggcacagctaccccaggattctaaaaggtttgaaggcatcgacattgactttaaagagctagcttatgatgcccagaaaattccaaatgtagtgcaaaccaccaacaagccaggcctgtatgaaaagctggaggatattcagggcagattgtgcctgtgtgagaaggccctggcagagtacctcgacaccaagaggcttgccttcccgcggttttactttctctcctcctccgatctgttagacatcctttccaacggcacagctccacaacaggttcaacgtcacctttccaaactctttgacaacatggccaagatgcgattccagctagatgccagtggggaaccaaccaagacaagcctcggcatgtacagcaaagaagaggagtatgtggctttcagtgagccctgtgactgcagcgggcaggtagaaatatggctgaaccatgtccttggtcacatgaaggccactgtgaggcatgagatgacagaaggtgtaactgcctatgaagaaaagccgagggagcagtggctttttgaccacccagctcaggtggccctgacctgtactcagatctggtggacaacagaagtgggcatggcatttgccaggctggaggaaggctatgagagtgccatgaaggactattataagaagcaagtggcccagctcaaaacccttatcaccatgctgattggccagctctccaagggagaccggcagaagattatgactatatgcaccatcgatgtgcatgcccgggatgtggtagccaagatgattgctcagaaggtagacaatgcccaggctttcctctggctgtctcagctgcgccatcgttgggatgacgaggtcaaacactgctttgccaacatctgtgatgcccagtttttgtattcctatgagtacctgggaaacacacctcgcttggtgatcacacctttgactgacaggtgctacatcaccctcacccagtccctgcacctgaccatgagtggggctcccgcaggacctgcaggcacaggcaagaccgagaccaccaaggacctgggccgcgcactgggcatcctggtctatgtgttcaactgctcggagcagatggattacaagtcttgtggcaacatctacaaaggccttgctcagactggtgcctggggctgctttgatgagtttaatcgaatctccgtggaggtcttgtcagtggtggcagtgcaggtaaaaagcattcaagatgcgattagagataagaagcagtggttcagcttccttggggaggagatcagcctgaatccttctgtcggtatcttcatcaccatgaacccaggctatgctggccgcacagagctgccagagaatctcaagtctctcttcaggccttgtgcaatggtggttccagactttgaattgatctgtgaaatcatgctggtggcagaaggattcattgaagcccagtcattagccagaaagttcatcactctttaccagttgtgcaaagagcttctctccaaacaggatcactacgactggggcctacgggccatcaagtccgtgctggtggtggcaggatccctgaagagaggagaccctgaccggcctgaggaccaggtcctgatgcgctccttgcgggatttcaacatccccaagattgtgactgatgacatgcccatcttcatgggcctgatcggggacctctttcccgccctggatgtcccccggaggagagaccccaacttcgaagctttggttaggaaggcgatagtggatctgaagctccaggctgaggacaactttgtgctcaaggtggtccagctggaggagctcctggctgtgcggcactctgtatttgtggtgggtggcgctggtaccggcaagtcacaggtgctgaggtccttgcacaagacctatcagatcatgaaacggcgccccgtctggactgacctcaatcccaaagcagtcacaaatgatgagctctttggcatcatcaatccagccacaggagaatggaaggatggattgttctcttccatcatgcgggagcttgccaacatcacccatgatgggcccaagtggattttactggatggcgacatagatccaatgtggattgaatccctgaatactgtcatggatgataacaaggtgctgacattggccagcaatgagaggattcctctgaaccccaccatgaagctcctctttgagatcagccacctgcgcacagccactccagcaactgtctctagagcagggatcttgtacatcaacccggcagacttgggatggaaccctccagtgagcagctggattgagaagagggaaatccagacagagagagccaacttaaccattttgttcgacaagtatcttccaacctgcctagacacactcagaaccaggtttaagaagatcattcccatcccagagcagagcatggttcagatggtgtgtcaccttctggaatgtctcctgaccacggaggacatccctgcagactgccctaaggaaatttatgagcattattttgtgtttgctgccatctgggctttcggcggagcaatggtccaagatcagcttgtggactaccgggcagagttcagcaaatggtggctgactgagttcaaaacagtcaagtttccttcccaaggaaccatctttgactattacatcgacccagagaccaagaaattcgagccttggtccaagctcgtcccccagttcgaatttgaccccgagatgcccttgcaggcgtgtttggtgcacacgagtgagaccatccgtgtgtgctacttcatggagcggttgatggcgcggcagcggcctgtcatgctggtgggcacggctggcactggcaagtcggtgctggtgggagctaagctggccagccttgaccccgaggcatacctggtgaaaaacgtgccattcaactactacaccacgtcagcaatgctgcaggctgtcctggagaagcctctggaaaagaaggctggcagaaactatggccctccagggaacaagaaactcatctatttcattgatgacatgaacatgcctgaggtggatgcctacgggacggtgcagccccacaccatcatccggcagcatctggactatggccactggtatgatcggagcaagctgtccctaaaggagatcacaaatgtacagtatgtttcctgtatgaaccccacggcaggcagcttcaccatcaacccccggcttcagcgtcacttcagcgtgtttgtcctctccttcccgggggcagatgccctgtcctctatctacagcatcatcctcactcagcatctgaagctcggaaacttcccggcgtccctgcagaaatccatccccccactgatcgatctggccctcgccttccaccagaaaattgctaccaccttcctacccacaggaatcaaattccactacatcttcaacctcagagattttgccaacattttccagggcattctcttctcctcagtggaatgtgtgaaatccacatgggatcttataaggctctatctgcatgaatcaaatcgagtttatcgggataagatggtagaagaaaaggactttgatctttttgataaaatccagacagaagtgctcaagaaaacttttgatgatattgaagaccctgtggagcagacccaaagcccgaacctgtattgtcactttgcaaatggtattggggagcccaaatacatgcctgtacagtcttgggaacttttgacccagactctggtggaggccttggagaaccacaatgaagtcaacacagtgatggacctagttctctttgaggatgccatgcgccatgtctgccatatcaatcgcatcttggagtccccgcggggaaatgctctgctggttggtgtaggtgggagcggcaagcagagcctgacaaggctggcagctttcatcagctccatggatgtcttccagatcacactgcgcaaaggctaccagatccaggacttcaagatggacctggccagcctgtgtctgaaagctggagtgaagaatctcaacacagtgtttctcatgactgatgcccaagtggctgatgagaggttccttgtgctcatcaatgatcttttggcatctggggagatcccagatctctactctgatgatgaagttgaaaacatcataagcaatgtgaggaatgaagtcaagagccagggtctggttgacaacagagagaactgttggaagttctttatagatcggatccggcgacagctgaaggtgactctctgtttctcccctgtgggaaacaagctaagagtccgcagcaggaagttcccagccattgtgaactgcacagccatccactggttccacgagtggcctcagcaagcattggagtctgtcagcctccgcttcttgcagaacacagagggcattgagcccacagtaaagcagtcgattagcaaattcatggcctttgtccacacaagtgtcaaccaaacatcccagtcttatctgagcaatgaacagcgctacaactatacaactcccaagtcctttctggagttcatcagactctaccagagcttgttgcacaggcacagaaaagagctcaagtgcaagacagagcggttggagaacgggctgctgaagctgcatagcacctctgcccaggtggatgatctgaaagcaaagctggctgcccaggaagtagagctgaagcagaaaaatgaagatgcagacaaactgattcaggtcgtgggtgtggagactgacaaagtgagcagagagaaagccatggcagatgaagaggagcagaaggtggccgtcatcatgctagaggtgaaacagaagcagaaggactgtgaggaggacctggcaaaggctgagccagcactcacagcagcgcaggcagctctcaacaccctgaacaagaccaacctgacagagctgaagtcatttggctctccgcctctggccgtcagcaatgtcagcgctgcggtgatggtactgatggctcccaggggtagggtgcccaaggaccggagctggaaggctgctaaggtcaccatggccaaagtggatggcttcctggactcgctaataaacttcaacaaagagaacattcacgagaactgcctcaaagccatcaggccgtatctgcaagaccccgagttcaatcctgagtttgtggccaccaaatcctatgcggctgcaggcctctgctcctgggtcatcaatattgtgagattttatgaggtgttctgtgatgtggaacccaagcgccaggcactgaacaaagccaccgcggacctcacagctgcccaggagaagctggctgccatcaaagccaagatcgctcaccttaatgaaaacctggcaaagctcacagccaggtttgagaaagcaacagcagacaaactcaaatgtcagcaagaagccgaagtgaccgcagtcaccatctcccttgccaaccgcctggttggaggactcgcttctgaaaacgtgaggtgggcagatgccgtgcagaacttcaaacagcaggaaaggacgttatgtggagacattttacttataacggctttcatttcctaccttggcttcttcacaaagaaataccggcagagcctcctggacagaacttggaggccctacctgagccagctgaaaactcccattccagtcaccccagccctggatcccctgaggatgctgatggatgatgctgacgtggctgcctggcagaacgagggcctcccagccgaccgcatgtccgtggagaatgccaccattctcatcaactgtgagcgctggccactcatggttgaccctcagctacaaggcatcaaatggatcaagaataaatatggtgaagatctccgggtcacgcagattggtcagaaaggctaccttcaaatcatagagcaggccctggaagctggagctgtggtgctgattgaaaatctagaggagtccattgatcctgttctgggacccctgcttgggagagaagtcattaaaaaaggacgattcattaaaattggagacaaagaatgtgaatacaatcccaagttccggctcatcctccacaccaagctggctaatcctcactaccagcctgagctgcaggctcaggccaccctgatcaacttcaccgtgaccagggatggcctggaggaccagttgctggccgctgtggtcagcatggagaggccagacttggagcagctgaagtccgatctcacaaagcagcagaatggattcaaaattaccctgaaaacgttggaagacagtcttctctctcgcctctcctccgcctctgggaacttcctgggagaaacagtgctggtggaaaacctagagatcaccaagcagactgctgccgaagttgagaaaaaggtccaggaggccaaggtgactgaagtgaaaatcaacgaggcccgagagcactaccggccagcagctgccagggcctcactgctctacttcatcatgaacgacctcagcaagatccatccaatgtaccagttttctctcaaggccttcagtatcgtcttccagaaggctgtggagagggctgctcctgacgaaagcctcagggagcgggtggccaacctaatagacagcataaccttctctgtgtaccagtacaccatccgcgggctctttgagtgtgataagctgacctaccttgcccagctcacctttcagattctcctcatgaaccgagaagtcaatgcagtggagttggatttcctgcttcgatctccagtgcagacgggcaccgccagccccgtggagttcctctcccatcaggcgtggggagctgtcaaggtactttcatcaatggaagaattctctaatctggatcgggacatagagggatctgctaagagctggaaaaagtttgtggagtccgaatgtcctgagaaagagaagctcccacaggagtggaagaacaagacagccctgcagcgcctctgcatgctgagagccatgcggcccgaccggatgacctatgctttgcgagattttgttgaagagaagttaggaagcaaatacgtggtgggaagagccctagattttgcaacctcatttgaagaatcgggaccagccactcctatgtttttcatcctgtctccaggggtggacccactgaaggatgtagaaagtcaaggaagaaaacttggatacaccttcaacaatcagaactttcacaacgtgtctttggggcaaggacaggaagtggtggctgaggctgcgctggacctcgctgccaagaaaggtcactgggttattttgcagaacattcacctggtggccaagtggctcagcaccctggagaagaagctggaggagcacagtgagaacagccacccagagttcagggtcttcatgagtgcagagccagcaccctcccctgagggccacatcatcccccagggcatcctggagaactccattaagatcaccaatgagccccccacgggcatgcatgccaacctgcacaaggccctggacaacttcactcaggacactctggagatgtgttctcgggagacggagtttaagagcatcctctttgctctttgttacttccatgcggtggtggcagaaagacgaaaatttgggccccagggatggaatcgctcatacccctttaacactggagacctcactatctctgtgaatgtcctctacaacttcctggaggccaacgcaaaggtcccctatgatgatttgcgctacctgtttggagagatcatgtatggaggccatatcacagatgactgggacagaagactctgcagaacctacctgggggaattcattcgaccagaaatgttagaaggagaactgtctttggccccagggttcccactcccaggcaacatggactacaatggttatcatcagtacatcgatgctgagctgcccccagaatccccctacctctatggcctccacccgaacgcagagattggcttcctgacccaaacctcagaaaagctcttccgcactgtgctggagctgcagcctcgggacagccaggccagagacggagcgggcgccacaagagaagaaaaggtcaaggcacttctggaagaaatattggagcgggtgacagacgagtttaacatcccagaactgatggccaaagtggaggagcgcaccccttacattgtagttgccttccaggagtgtggccggatgaatatcctcaccagagagattcagcgctcactgagggagctggagctcggcttaaagggggagctgactatgaccagccacatggagaacttacagaatgccctgtacttcgatatggtgccagagtcctgggctagacgagcctacccttccacagcaggcctggcagcctggtttccagacctcctcaacagaatcaaggagctagaggcttggacgggtgactttacaatgccctccactgtgtggctgacaggcttcttcaacccccagtcgttcctgactgccatcatgcagtccacggctcgcaagaatgagtggccactggaccagatggccctgcaatgtgacatgacgaagaagaacagagaagagtttaggagtcctcctcgggaaggggcctacatccatggcctcttcatggaaggtgcctgctgggacacacaggctgggatcattacagaggcaaagctgaaggatctgacaccccctatgcctgtgatgttcatcaaggccattcctgcagataagcaggactgccgcagtgtctattcctgtcctgtgtacaagactagtcagcggggacccacctacgtgtggactttcaacctgaagactaaggaaaacccatccaagtgggttctggctggagtagccttgcttctccagatttag

SEQ ID NO: 112 - DNA, 5646 bp, Homo sapiens
atgccctattctgtgggcttccgcgaagccgatgctgctaccagctttctgagagcagcaagatcaggtaacttggacaaagctttggatcacctgcggaatggggtagatattaacacctgtaaccagaatgggttgaatggcttgcatctggcttctaaggaaggccatgtgaaaatggtggttgaacttctgcacaaagaaatcattctagaaacgacaaccaagaaggggaacacggccctgcacatcgctgctctagccgggcaggatgaggtggtccgggagcttgtcaactatggagccaacgtcaacgcccagtcacagaaaggttttacacccctgtacatggcagcacaagagaaccacttggaagtggttaagtttttactggaaaatggagctaaccagaatgtagccacagaagacggcttcacgcctctggcggtagccctgcagcagggccatgagaacgtcgtcgcgcacctcatcaactacggcaccaaggggaaggtgcgcctcccggccctgcacatcgcggcccgcaacgacgacacgcgcacggctgcggtgctgctgcagaacgaccccaacccggacgtgctttccaagacgggattcacgcccctgcacattgcggctcactacgagaacctcaacgtggcccagttgctcctcaacagaggagccagcgtcaatttcacaccacagaacggcatcacgccactgcacatcgcctcccgcaggggcaacgtgatcatggtgcggctgctgctggatcggggagcccagatagaaaccaagaccaaggacgaattgacacctctccactgtgcagctcgaaatgggcacgtgcgaatctcagagatcctgctggaccacggggcaccaatccaagccaaaaccaagaacggcctgtccccaattcacatggcggctcagggagaccacctcgactgtgtccggctcctgttgcaatacgacgcagagatagacgacatcaccctggaccacctgaccccactccacgtggctgcccactgtggacaccacagggtggctaaggtccttctggataaaggggccaaacccaactccagagccctgaatggctttacccccttacacatcgcctgcaaaaagaaccacgtccgtgtcatggagctgctgctgaagacgggagcctcgatcgacgcggtcaccgagtctggcctgacacctctccacgtggcctccttcatggggcaccttcccatcgtgaagaacctcctgcagcggggggcgtcgcccaacgtctccaacgtgaaagtggagaccccgctacacatggcagccagagccgggcacacggaagtggccaaatatttactccagaacaaagccaaagtcaatgccaaggccaaggatgaccagaccccacttcactgtgcagctcgcatcggccacacaaacatggtgaagctcctgctggaaaataacgccaaccccaacctggccaccaccgccgggcacacccccctgcacattgcagcccgtgagggccatgtggaaacagtcctggcccttctggaaaaggaagcatcccaggcctgcatgaccaagaaaggatttacccctctgcacgtggcggccaagtacgggaaggtgcgggtggcagagctgctgctggagcgggacgcacacccgaatgctgccggaaaaaatggcctgacccccctgcacgtggccgtccatcacaacaacctggacatcgtcaagctgctgcttccccggggcggctccccgcacagccctgcctggaatggctacacccctttgcacatcgctgccaagcagaaccaggtggaggtggcccgtagtctgctgcagtatgggggctcagcaaacgccgagtcggtgcaaggtgtgacgccccttcacctggccgcccaggagggccacgcagagatggtggctctgctgctctcgaaacaagccaatggcaacctggggaacaagagcggactcactcccctccatctggtagcacaagaaggccacgttccagtggcagatgtgctgatcaaacacggcgtcatggtggacgccaccacccggatgggctacactcccctccatgtggccagtcactatggaaacatcaagctggtgaagtttctgctgcagcaccaggcagatgtcaatgccaagaccaagctaggatacagccccctgcaccaggcagcccagcagggacacacagacatcgtgactctgcttctgaaaaacggtgcttccccaaacgaggtcagctcggatggaaccacacctctggccatagccaagcgcttgggctacatttctgtcaccgacgtgctcaaggtcgtcacggatgaaaccagtttcgtgttagtcagtgataagcatcgaatgagtttccctgagacagttgatgagatcctggatgtctcggaagatgaaggggaagaactcatcagcttcaaggctgagaggcgggattccagggatgttgatgaagagaaggagctgctggattttgtgccgaagctagaccaagtggtggaatctccagccatccccaggattccctgtgccatgcctgagacagtggtgatcaggtcagaagagcaggagcaggcatctaaagagtatgatgaggactccctcatccccagcagcccggccaccgagacctcagacaacatcagcccggtggccagcccggtgcatacagggtttctggtgagcttcatggttgacgcccggggtggttccatgagaggaagtcgccacaacggcctgcgagtggtgatcccgccacggacgtgcgcagcgcccacccgcatcacctgccgcctggtcaagccccagaagctcagcacgccgcccccactggccgaggaggagggcctggccagcaggatcatagcactggggcccacgggggcacagttcctgagccctgtaatcgtggagatcccgcactttgcctcccatggccgtggagaccgcgagctcgtggttctgaggagcgaaaacggctccgtgtggaaggagcacaggagccgctatggagagagctacctggatcagatcctcaacgggatggacgaagagctggggagcctggaggagctagagaagaagagggtgtgccgaatcatcaccaccgacttcccgctgtacttcgtgatcatgtcacggctctgccaggactacgacaccatcggtcccgaagggggctccctgaagagcaagctggtgcccctggtacaggcaacgttcccggagaatgccgtcaccaagagagtgaagctggctctgcaggcccagcctgtcccggatgagcttgtcactaagctcctgggcaaccaggccacattcagccccattgtcaccgtggagccccggcgccggaagttccaccgccccattgggcttcggatcccactacctccttcctggaccgacaacccgagggacagcggggagggagacaccaccagcctgcgcctgctttgcagcgtcattggaggaacagaccaagcccagtgggaagacataacaggaaccaccaaacttgtatatgccaacgagtgcgccaacttcaccaccaatgtctctgccaggttttggctgtcggactgtcctcggactgctgaggctgtgaactttgccaccctgctgtacaaagagctcactgcagtgccctacatggccaaattcgtcatctttgccaagatgaatgacccccgagaggggcgcctgcgctgctactgcatgacagatgataaagtggacaagaccctggagcagcatgagaacttcgtggaggtggcccggagcagggacatagaggtgttggaaggaatgtccctgtttgcagaactctctgggaacctggtgcctgtgaagaaagctgcccagcagcggagcttccacttccagtcatttcgggagaaccgtctggccatgcctgtaaaggtgagggacagcagtcgagagccgggagggtccctgtcgtttctgcgcaaggcgatgaagtacgaggacacccagcacattctctgccacctgaacatcaccatgcccccctgcgccaagggaagtggagccgaagataggagaaggaccccgacgcccctggccctgcgatacagcattctcagtgagtccacaccaggttctctcagtgggacagagcaggcagagatgaagatggctgttatctcagagcacctcggtctcagctgggcagagttggcccgggagctgcagttcagtgtggaagacatcaacaggatccgagtggaaaatcccaactccctgttggagcagagtgtggccttgctgaacctctgggtcatccgtgaaggccaaaacgcaaacatggagaatctgtacacagccctgcagagcattgaccgtggcgagatcgtgaacatgctggagggttccggccgacagagccgcaacttgaagccagacaggcggcacaccgaccgcgactactcgctgtcaccctcccagatgaatggttactcctcactgcaggacgagctgctgtcccctgcctccctgggctgtgcactttcctctccgctacgtgcagaccagtactggaatgaggtggccgtcctagacgccatccccttggcggccacggagcatgacaccatgctggagatgtctgacatgcaggtgtggtctgcgggcctcacgccttctctggtcactgctgaggactcctctctggagtgtagcaaggctgaggactctgatgccacaggtcacgagtggaagttggagggggcactctcagaggaaccgcggggccccgagttgggctctctggaacttgtggaggacgacacagtggattcagatgccacaaatggccttatcgatttgcttgaacaggaggaaggtcagaggtcagaagagaagctgccaggttctaagaggcaggatgacgcgacaggtgcagggcaggactcagagaatgaagtgtctcttgtttcaggccatcagagggggcaagcccgaatcacacattcccccaccgtgagtcaggtgacggagaggagtcaggacagactgcaggactgggatgcagacggctcgattgtctcatacctgcaagatgctgcacaaggttcctggcaagaggaggtcacgcaaggtccacactcattccagggaacaagtaccatgactgaagggctagagcccggtggatctcaggagtacgagaaggtcctggtgtctgtaagtgagcacacgtggacagaacagcccgaggctgagagctcccaggccgacagggaccggaggcagcaaggccaagaagagcaggtgcaggaggccaagaacaccttcacccaagtggtgcaggggaatgagtttcagaatattccaggggagcaggtgacagaggagcaattcacggatgagcagggcaacattgtcaccaagaagatcattcgcaaggtggttcgacagatagacttgtccagcgccgatgccgcccaggagcacgaggaggtgactgtagaggggcccctggaggatcccagtgagctggaggtcgatattgattactttatgaaacactccaaggatcacacctcgacacccaacccctga

SEQ ID NO: 113 - DNA, 1992 bp, Homo sapiens
atggccaccacggtgacctgcacccgcttcaccgacgagtaccagctctacgaggatattggcaagggggctttctctgtggtccgacgctgtgtcaagctctgcaccggccatgagtatgcagccaagatcatcaacaccaagaagctgtcagccagagatcaccagaagctggagagagaggctcggatctgccgccttctgaagcattccaacatcgtgcgtctccacgacagcatctccgaggagggcttccactacctggtcttcgatctggtcactggtggggagctctttgaagacattgtggcgagagagtactacagcgaggctgatgccagtcactgtatccagcagatcctggaggccgttctccattgtcaccaaatgggggtcgtccacagagacctcaagccggagaacctgcttctggccagcaagtgcaaaggggctgcagtgaagctggcagacttcggcctagctatcgaggtgcagggggaccagcaggcatggtttggtttcgctggcacaccaggctacctgtcccctgaggtccttcgcaaagaggcgtatggcaagcctgtggacatctgggcatgtggggtgatcctgtacatcctgctcgtgggctacccacccttctgggacgaggaccagcacaagctgtaccagcagatcaaggctggtgcctatgacttcccgtcccctgagtgggacaccgtcactcctgaagccaaaaacctcatcaaccagatgctgaccatcaaccctgccaagcgcatcacagcccatgaggccctgaagcacccgtgggtctgccaacgctccacggtagcatccatgatgcacagacaggagactgtggagtgtctgaaaaagttcaatgccaggagaaagctcaagggagccatcctcaccaccatgctggccacacggaatttctcagtgggcagacagaccaccgctccggccacaatgtccaccgcggcctccggcaccaccatggggctggtggaacaagccaagagtttactcaacaagaaagcagatggagtcaagccccagacgaatagcaccaaaaacagtgcagccgccaccagccccaaagggacgcttcctcctgccgccctggagcctcaaaccaccgtcatccataacccagtggacgggattaaggagtcttctgacagtgccaataccaccatagaggatgaagacgctaaagcccccagggtccccgacatcctgagctcagtgaggaggggctcgggaagaagccgaggggccccttgcccatctccggctccctttagccccctgccagccccatcccccaggatctctgacatcctgaactctgtgagaaggggttcaggaaccccagaagccgagggccccctctcagcggggcccccgccctgcctgtctccggctctcctaggccccctgtcctccccgtcccccaggatctctgacatcctgaactctgtgaggaggggctcagggaccccagaagccgagggcccctcgccagtggggcccccgccctgcccatctccgactatccctggccccctgcccaccccatcccggaagcaggagatcattaagaccacggagcagctcatcgaggccgtcaacaacggtgactttgaggcctacgcgaaaatctgtgacccagggctgacctcgtttgagcctgaagcactgggcaacctggttgaagggatggacttccacagattctacttcgagaacctgctggccaagaacagcaagccgatccacacgaccatcctgaacccacacgtgcacgtcattggagaggatgccgcctgcatcgcttacatccggctcacgcagtacattgacgggcagggccggccccgcaccagccagtctgaggagacccgcgtgtggcaccgccgcgacggcaagtggcagaacgtgcacttccactgctcgggcgcgcctgtggccccgctgcagtga

SEQ ID NO: 114 - DNA, 1983 bp, Homo sapiens
atggtccaaagggacatgtccaagtcgcctcccacagcggcggcggcggtggcgcaggagatccagatggaactgctagagaacgtggctcccgcgggggcgctcggagccgccgcacagtcatatggaaaaggagccagaaggaaaaacagatttaaaggatctgatggaagcacgtcatctgatactacctcaaatagttttgttcgccagggttcggcagactcctacactagccgtccatccgattccgatgtatctctggaggaggaccgggaggcagtgcgcagagaagcggagcggcaggcccaggcacagttggaaaaagcaaagacaaagcccgttgcatttgcggttcggacaaatgtcagctacagtgcggcccatgaagatgatgttccagtgcctggcatggccatctcattcgaagcaaaagattttctgcatgttaaggaaaaatttaacaatgactggtggatagggcgattggtaaaagaaggctgtgaaatcggattcattccaagcccagtcaaactagaaaacatgaggctgcagcatgaacagagagccaagcaagggaaattctactccagtaaatcaggaggaaattcatcatccagtttgggtgacatagtacctagttccagaaaatcaacacctccatcatctgctatagacatagatgctactggcttagatgcagaagaaaatgatattccagcaaaccaccgctcccctaaacccagtgcaaacagtgtaacgtcaccccactccaaagagaaaagaatgcccttctttaagaagacagagcacactcctccgtatgatgtggtaccttccatgcgaccagtggtcctagtgggcccttctctgaagggctacgaggtcacagatatgatgcaaaaagcgctgtttgattttttaaaacacagatttgaagggcggatatccatcacaagggtcaccgctgacatctcgcttgccaaacgctcggtattaaacaatcccagtaagcacgcaataatagaaagatccaacacaaggtcaagcttagcggaagttcagagtgaaatcgaaaggatttttgaacttgcaagaacattgcagttggtggtccttgacgcggatacaattaatcatccagctcaactcagtaaaacctccttggcccctattatagtatatgtaaagatttcttctcctaaggttttacaaaggttaataaaatctcgagggaaatctcaagctaaacacctcaacgtccagatggtagcagctgataaactggctcagtgtcctccagagctgttcgatgtgatcttggatgagaaccagcttgaggatgcctgtgagcaccttgccgactatctggaggcctactggaaggccacccatcctcccagcagtagcctccccaaccctctccttagccgtacattagccacttcaagtctgcctcttagccccaccctagcctctaattcacagggttctcaaggtgatcagaggactgatcgctccgctcctatccgttctgcttcccaagctgaagaagaacctagtgtggaaccagtcaagaaatcccagcaccgctcttcctcctcagccccacaccacaaccatcgcagtgggacaagtcgcggcctctccaggcaagagacatttgactcggaaacccaggagagtcgagactctgcctacgtagagccaaaggaagattattcccatgaccacgtggaccactatgcctcacaccgtgaccacaaccacagagacgagacccacgggagcagtgaccacagacacagggagtcccggcaccgttcccgggacgtggatcgagagcaggaccacaacgagtgcaacaagcagcgcagccgtcataaatccaaggatcgctactgtgaaaaggatggagaagtgatatcaaaaaaacggaatgaggctggggagtggaacagggatgtttacatccgccaatga

SEQ ID NO: 115 - DNA, 1374 bp, Homo sapiens
atgcgctccgccgctgtcctggctcttctgctctgcgccgggcaagtcactgcgctccctgtgaacagccctatgaataaaggggataccgaggtgatgaaatgcatcgttgaggtcatctccgacacactttccaagcccagccccatgcctgtcagccaggaatgttttgagacactccgaggagatgaacggatcctttccattctgagacatcagaatttactgaaggagctccaagacctcgctctccaaggcgccaaggagagggcacatcagcagaagaaacacagcggttttgaagatgaactctcagaggttcttgagaaccagagcagccaggccgagctgaaagaggcggtggaagagccatcatccaaggatgttatggagaaaagagaggattccaaggaggcagagaaaagtggtgaagccacagacggagccaggccccaggccctcccggagcccatgcaggagtccaaggctgaggggaacaatcaggcccctggggaggaagaggaggaggaggaggaggccaccaacacccaccctccagccagcctccccagccagaaatacccaggcccacaggccgagggggacagtgagggcctctctcagggtctggtggacagagagaagggcctgagtgcagagccagggtggcaggcaaagagagaagaggaggaggaggaggaggaggaggctgaggctggagaggaggctgtccccgaggaagaaggccccactgtagtgctgaacccccacccgagccttggctacaaggagatccggaaaggcgagagtcggtcggaggctctggctgtggatggagctgggaagcctggggctgaggaggctcaggaccccgaagggaagggagaacaggagcactcccagcagaaagaggaggaggaggagatggcagtggtcccgcaaggcctcttccggggtgggaagagcggagagctggagcaggaggaggagcggctctccaaggagtgggaggactccaaacgctggagcaagatggaccagctggccaaggagctgacggctgagaagcggctggaggggcaggaggaggaggaggacaaccgggacagttccatgaagctctccttccgggcccgggcctacggcttcaggggccctgggccgcagctgcgacgaggctggaggccatcctcccgggaggacagccttgaggcgggcctgcccctccaggtccgaggctaccccgaggagaagaaagaggaggagggcagcgcaaaccgcagaccagaggaccaggagctggagagcctgtcggccattgaagcagagctggagaaagtggcccaccagctgcaggcactacggcggggctga

SEQ ID NO: 116 - DNA, 876 bp, Homo sapiens
atgcagcgggcgcgacccacgctctgggccgctgcgctgactctgctggtgctgctccgcgggccgccggtggcgcgggctggcgcgagctcggcgggcttgggtcccgtggtgcgctgcgagccgtgcgacgcgcgtgcactggcccagtgcgcgcctccgcccgccgtgtgcgcggagctggtgcgcgagccgggctgcggctgctgcctgacgtgcgcactgagcgagggccagccgtgcggcatctacaccgagcgctgtggctccggccttcgctgccagccgtcgcccgacgaggcgcgaccgctgcaggcgctgctggacggccgcgggctctgcgtcaacgctagtgccgtcagccgcctgcgcgcctacctgctgccagcgccgccagctccaggaaatgctagtgagtcggaggaagaccgcagcgccggcagtgtggagagcccgtccgtctccagcacgcaccgggtgtctgatcccaagttccaccccctccattcaaagataatcatcatcaagaaagggcatgctaaagacagccagcgctacaaagttgactacgagtctcagagcacagatacccagaacttctcctccgagtccaagcgggagacagaatatggtccctgccgtagagaaatggaagacacactgaatcacctgaagttcctcaatgtgctgagtcccaggggtgtacacattcccaactgtgacaagaagggattttataagaaaaagcagtgtcgcccttccaaaggcaggaagcggggcttctgctggtgtgtggataagtatgggcagcctctcccaggctacaccaccaaggggaaggaggacgtgcactgctacagcatgcagagcaagtag

SEQ ID NO: 117 - DNA, 4794 bp, Homo sapiens
gctggtctcctgcttgacaccataaagaggccagcattgcagggtctatgtctttgtcttgacttccagtttgatactgtggttaaagacagacccacaattttgagcaagcttttactcttgcactttcttaagcaggatattcctgctctgagctgggagttctttgtcaatagatttgagacgctttctttggaagcccagctacatttggattgtaacaaggaatttccttttcctacaaccatcactgctgtgaggaccaatgttgctaacctcagcgatgcagccttatggaagatcaagagagctcgctttgcaagaaaccgccagaagagtgtacgttccctgagggacagcgtgaaagggcctgtggaatccaagagggcgctctccctccctgagaccctgacctccaaaattcctatgaggttgaccaggcatgagcagtctgctccagctctcggtgggacacccgaacagacgccaggacaacaatctcctgagaatgacaacaccatcaaggacctgctcccagaagacgctgggatcgaccaccagacagttcaccagctgattacagtgctcatgaagttcatggccaaggatgaaagcagcgctgagtcagacatcagcagtgcaaaggccttcaacacggtcaagcgacacctgtacgtcttactcggctatgaccagcaggaaggttgcttcatgattgcacctcaaaaaatgcgcctgtcaacttgctttaatgcattcattgcaggaattgcccaagttatggactataacattaacttgggaaaacaccttctccccttagtggttcaggtgctcaaatactgctcttgtcctcaactccggcattatttccaacagccgcctcgttgctccctctggtccctaaagcctcacatccggcagatgtggttgaaggccttgcttgtcatcctttacaagtatccataccgagactgtgatatcagcaagatcctgctgcatctgattcacataacagtcaatacactcaatgcgcagtatcatagctgcaagccccatgccacggcaggacctttgtacagtgacaacagtaacataagcagatacagcgaaaaagaaaaagaagaagatagtgtttttgatgaatctgatattcatgatacacctactggaccctgcaataaagagtctcaaactttttttgcaagattgaaaagaataggcggcagcaaaatggtgaaatatcagccggttgagatgaatgttcagagaagtgaaatagaactggctgaatatagagagacgggtgcattacaagacagccttctccactgtgtgagagaagaaagcattccgaaaaaaaagctacgctctttcaaacaaaaatctcttgatatagggaatgcagactcgcttttgtttacattagacgaacatcgtaggaagtcgtgcatagatcggtgtgacatagagaagcctccgacccaagctgcgtatatcgcacaaagaccaaacgaccctggacgttctagacagaactctgctacgaggcctgacaatagtgaaatccccgagaacccagctatggaagggtttccagatgctcgaaggcctgtcataccagaggttaggttaaactgtatggagactttcgaggtgaaagttgactcgccggtaaagcctgctcctaaagaggatttagatctgatagatctatcctcagattcaacctcggggcctgaaaaacactctatactctcaacctccgacagcgactctcttgtatttgagcctcttccccctctcagaatagtcgagagtgacgaagaagaggagacgatgaaccaaggcgatgacggcccctccggtaaaaatgctgcctcttctccctccgtccccagccatccctccgtcctcagcctgagcacagctccgcttgtacaagtaagtgtggaggattgttccaaagacttttcttctaaggactcaggaaataatcagtcagcagggaacactgactctgccctcatcactctggaagaccctatggacgccgaaggatcctcaaagccagaggagctgccagagttctcctgcggtagcccactgacgctgaagcaaaaacgagacctccttcagaagtcgtttgctctccccgagatgtcgctggatgatcaccctgacccgggcactgagggggagaagcctggggagctgatgccaagttcaggggcaaaaaccgtcctcctcaaagttcccgaagatgcagagaaccccacagaaagtgagaagcctgataccagtgcagaatctgatacagaacagaatcctgaaaggaaggtggaagaggatggagctgaggaatccgaatttaagattcagattgttcccaggcagaggaagcagaggaagattgctgtcagtgctatccagagagagtacctcgacatctccttcaacattctggacaaactgggagaacagaaagatccagatccttctactaaaggactttcaactttggaaatgccacgagaatcttcatctgcccctacgttagatgcaggtgtgccggaaacaagtagccattcctcaatatcaactcagtataggcagatgaaaaggggatccctgggagttctgacaatgagccagttaatgaagcggcagctggagcatcagtctagcgccccccataacatcagcaactgggacactgaacagatacagcctgggaaacgccagtgtaacgtgccaacgtgcctaaaccctgacctggagggacagccattgaggatgagaggtgccaccaaatccagcctgctatcagcaccaagcatagtcagtatgtttgtgcctgcacctgaagagttcactgacgagcagccgacggtgatgacggacaaatgccatgactgtggggccattcttgaagaatacgatgaagagacacttgggctagccatcgtggtcctctccacattcattcacttaagcccagacctggcagccccgctgctgctggatatcatgcagtctgtgggaagattggcatccagtactaccttttctaatcaagcagaaagcatgatggttcccggcaatgcggcgggggtggccaagcagttcctgcgctgcatcttccatcagttggcccccaacggcatcttcccgcagctgttccaaagcacgatcaaagatgggacttttttacggaccttagcctcgtctctgatggacttcaatgagctgagctccatcgcagctctcagtcagctcctagagggtctaaataacaaaaagaatttaccagcagggggtgctatgattcgctgtttggaaaacattgcaaccttcatggaagctttgcctatggattctcctagtagcctctggaccacaattagcaaccagtttcagacattttttgccaagctgccttgtgttttacctctgaagtgttctttagattccagtttaagaattatgatttgcctcttgaagatcccttctaccaatgctacaaggagtttgttggaaccattttcaaaactgctcagctttgtaattcagaatgccgtcttcactctggcctacctggtggagctgtgtggcttatgttaccgagctttcactaaggaacgagataaattctacttgtctcgtagtgttgttctagaacttctgcaggccctaaagctcaaatctcctttaccagatacaaaccttcttctgcttgttcagtttatttgtgcagatgctggaaccaaactagctgagtcaacaatcctgagcaagcagatgatagcctctgtacctggatgtgggactgcagcgatggagtgtgtgaggcagtacatcaacgaagtgctggatttcatggcagacatgcacacgctgaccaaactgaagagccacatgaagacatgttcccagcctctgcatgaagatacctttgggggacatctcaaagtggggctggcccagattgcagccatggacatctcacggggcaaccacagagataacaaagctgtgatccgctatctgccttggctttatcatcccccctctgcaatgcagcaaggacctaaagaattcattgagtgtgtctcccatatccgactgttgtcctggctgctgctgggttccctcactcacaatgcagtgtgcccaaatgcctcctctccctgcctgcccattcctctggatgcaggctcccacgttgcagaccatcttattgttatcctgattggatttccagagcaatcaaagacctccgtgctgcacatgtgctccctcttccacgcgttcatctttgctcagctgtggacagtttattgcgagcaaagtgccgtcgctacaaatctccaaaatcagaatgaattcagcttcacggcgatactgacagcactagaattttggagtagggtgacacccagcatccttcagctaatggcccataacaaagtgatggtagaaatggtgtgtctccatgtgattagtttaatggaggcattgcaggaatgcaattcgaccatttttgtcaagctgatacctatgtggttgccaatgattcagtcaaatatcaagcacttatctgcgggactccagcttcgcctccaggctattcagaaccacgtgaaccaccacagcctaaggacgctgccgggctcgggccagagcagtgctggcctggcagccctccgaaagtggttgcagtgcactcagttcaaaatggcccaggtggagatccagtcctcggaagcagcctctcaattttatcctctatga

SEQ ID NO: 118 - DNA, 480 bp, Homo sapiens
atgaagaaccatttgcttttctggggagtcctggcggtttttattaaggctgttcatgtgaaagcccaagaagatgaaaggattgttcttgttgacaacaaatgtaagtgtgcccggattacttccaggatcatccgttcttccgaagatcctaatgaggacattgtggagagaaacatccgaattattgttcctctgaacaacagggagaatatctctgatcccacctcaccattgagaaccagatttgtgtaccatttgtctgacctctgtaaaaaatgtgatcctacagaagtggagctggataatcagatagttactgctacccagagcaatatctgtgatgaagacagtgctacagagacctgctacacttatgacagaaacaagtgctacacagctgtggtcccactcgtatatggtggtgagaccaaaatggtggaaacagccttaaccccagatgcctgctatcctgactaa

SEQ ID NO: 119 - DNA, 471 bp, Homo sapiens
atgatggaggagatcgaccggttccaggacccagccgccgcctccatctctgacggagactgtgacgcccgggaggagaagcagcgggagctggcccggaagggctccctgaagaatggcagcatgggtagccctgtcaaccagcaacccaagaagaacaatgtcatggcccgaacaaggctggtcgtccccaataaaggctactcctcacttgaccagagccctgatgagaagccactggtagcccttgacacggacagcgatgatgactttgacatgtctagatactcctcctccggctactcctctgctgagatcaaccaagatttgaacatccagctgctgaaggacggctaccggttagatgagatccccgacgacgaggacctagacctcatcccccccaagtccgtgaaccccacgtgcatgtgctgccaggccacgtcctccaccgcctgccacattcagtag

SEQ ID NO: 120 - DNA, 1188 bp, Homo sapiens
atgtgtgatcagacctttctcgttaatgtatttggctcatgtgacaaatgtttcaaacaacgagctctgagaccagttttcaagaagtctcaacaactcagctactgttcaacatgtgcagaaattatggcaaccgaggggctgcacgagaacgagacgctggcgtcgctgaagagcgaggccgagagcctcaagggcaagctggaggaggagcgagccaagctgcacgatgtggagctgcaccaggtggcggagcgggtggaggccctggggcagtttgtcatgaagaccagaaggaccctcaaaggccacgggaacaaagtcctgtgcatggactggtgcaaagataagaggaggatcgtgagctcgtcacaggatgggaaggtgatcgtgtgggattccttcaccacaaacaaggagcacgcggtcaccatgccctgcacgtgggtgatggcatgtgcttatgccccatcgggatgtgccattgcttgtggtggtttggataataagtgttctgtgtaccccttgacgtttgacaaaaatgaaaacatggctgccaaaaagaagtctgttgctatgcacaccaactacctgtcggcctgcagcttcaccaactctgacatgcagatcctgacagcgagcggcgatggcacatgtgccctgtgggacgtggagagcgggcagctgctgcagagcttccacggacatggggctgacgtcctctgcttggacctggccccctcagaaactggaaacaccttcgtgtctgggggatgtgacaagaaagccatggtgtgggacatgcgctccggccagtgcgtgcaggcctttgaaacacatgaatctgacatcaacagtgtccggtactaccccagtggagatgcctttgcttcagggtcagatgacgctacgtgtcgcctctatgacctgcgggcagatagggaggttgccatctattccaaagaaagcatcatatttggagcatccagcgtggacttctccctcagtggtcgcctgctgtttgctggatacaatgattacactatcaacgtctgggatgttctcaaagggtcccgggtctccatcctgtttggacatgaaaaccgcgttagcactctacgagtttcccccgatgggactgctttctgctctggatcatgggatcataccctcagagtctgggcctaa

SEQ ID NO: 121 - DNA, 1236 bp, Homo sapiens
atgcaatgttcctggaaggccgtcctcctccttgccctggcctccattgccatccagtacacggccatccgcaccttcaccgccaagtcctttcacacctgccccgggctggcagaggccgggctggccgagcgactgtgcgaggagagccccaccttcgcctacaacctctcccgcaagacccacatcctcatcctggccaccacgcgcagtggctcctccttcgtgggccagctcttcaaccagcacctggacgtcttctacctgtttgagcccctctaccacgtccagaacacgctcatcccccgcttcacccagggcaagagcccggccgaccggcgggtcatgctaggcgccagccgcgacctcctgcggagcctctacgactgcgacctctacttcctggagaactacatcaagccgccgccggtcaaccacaccaccgacaggatcttccgccgcggggccagccgggtcctctgctcccggcctgtgtgcgaccctccggggccagccgacctggtcctggaggagggggactgtgtgcgcaagtgcgggctactcaacctgaccgtggcggccgaggcgtgccgcgagcgcagccacgtggccatcaagacggtgcgcgtgcccgaggtgaacgacctgcgcgccctggtggaagacccgcgattaaacctcaaggtcatccagctggtccgagacccccgcggcattctggcttcgcgcagcgagaccttccgcgacacgtaccggctctggcggctctggtacggcaccgggaggaaaccctacaacctggacgtgacgcagctgaccacggtgtgcgaggacttctccaactccgtgtccaccggcctcatgcggcccccgtggctcaagggcaagtacatgttggtgcgctacgaggacctggctcggaaccctatgaagaagaccgaggagatctacgggttcctgggcatcccgctggacagccacgtggcccgctggatccagaacaacacgcggggcgaccccaccctgggcaagcacaaatacggcaccgtgcgaaactcggcggccacggccgagaagtggcgcttccgcctctcctacgacatcgtggcctttgcccagaacgcctgccagcaggtgctggcccagctgggctacaagatcgccgcctcggaggaggagctgaagaacccctcggtcagcctggtggaggagcgggacttccgccccttctcgtga

SEQ ID NO: 122 - DNA, 2373 bp, Homo sapiens
atgggtactaggaaaaaagttcatgcatttgtccgtgtcaaacccaccgatgactttgctcatgaaatgatcagatacggagatgacaaaagaagcattgatattcacttaaaaaaagacattcggagaggagttgtcaataaccaacagacagactggtcgtttaagttggatggagttcttcacgatgcctcccaggacttggtttatgagacagttgcaaaggatgtggtttctcaggccctcgatggctataatggcaccatcatgtgttatgggcagacgggagctggcaagacatacaccatgatgggggcaactgagaattacaagcaccgggggatcctccctcgtgccctgcagcaggtttttaggatgatcgaagaacgccccacacatgccatcactgtgcgtgtttcctacttggaaatctataatgagagcctgtttgatctcctgtccactctgccctatgttggaccctcagtcacaccaatgaccatcgtggaaaaccctcaaggagtcttcattaagggcttgtcagttcacctcacaagtcaggaggaggatgcattcagcctcctttttgagggtgagaccaacaggattatagcctcccacactatgaacaaaaactcttccagatcacactgcattttcaccatctacttagaggcccattcccggaccttatcagaggaaaagtacatcacttccaaaattaacttggtggatctggcaggctcagagaggctggggaagtctgggtctgagggccaagtcctgaaggaagccacctacatcaacaaatcgctctcattcctggagcaggccatcattgcccttggggaccagaagcgggaccacatcccctttcggcagtgcaagctcacccacgctctgaaggactcgttagggggaaactgcaatatggtcctcgtgacaaacatctatggagaagctgcccagttagaagaaacgctatcttcactgagatttgccagcaggatgaagctagtcaccactgagcctgccatcaatgaaaagtatgatgctgagagaatggtcaagaacctggagaaggaactagcactactcaagcaggagctggctatccatgacagcctgaccaaccgcacctttgtgacctatgaccccatggatgaaatccagattgctgagatcaactcccaggtgcggaggtacctggaggggacactggacgagatcgacataatcagccttagacagatcaaggaggtgttcaaccagttccgggtggttctgagccaacaggaacaggaagtggagtccactttgcgcaggaagtacaccctcattgacaggaatgactttgcagccatttctgctatccagaaggcggggcttgtggatgttgatggccacctagtgggtgagcctgaaggacaaaactttggactcggagtcgcccctttctctaccaaacctgggaagaaagccaagtccaagaagacattcaaagagccactcagctccttggcaagaaaggaaggtgccagcagccctgtgaatgggaaggacttggattacgtttccacctccaagacccagctggtcccatcctccaaagatggggatgtcaaagacatgctttcgcgggaccgggaaacttccagcattgagccccttccctcagactccccgaaggaggaattacgcccaattaggcccgacaccccaccctccaaaccagtggcctttgaggagtttaagaatgagcaaggtagtgagatcaaccgaattttcaaagaaaacaaatccatcttgaatgaacggaggaaaagggccagcgagaccacacagcacatcaatgccatcaagcgggagattgatgtgaccaaggaggccctgaatttccagaagtcactacgggagaagcaaggcaagtacgaaaacaaggggctgatgatcatcgatgaggaagaattcctgctgatcctcaagctcaaagacctcaagaagcagtaccgcagcgagtaccaggacctgcgtgacctcagggctgagatccagtattgccagcacctagtggatcagtgtcgccaccgcctgctcatggaatttgacatctggtacaatgagtcctttgtcatccctgaggacatgcagatggcactgaagccaggcggcagcatccggccaggcatggtccctgtgaacaggattgtgtctctgggagaagatgaccaggacaaattcagccagctgcagcagagggtgcttcctgagggccctgattccatctccttctacaatgccaaagtcaagatagagcagaagcataattacttgaaaaccatgatgggcctccagcaggcacatagaaaatag

SEQ ID NO: 123 - DNA, 1101 bp, Homo sapiens
atgcgggtcatggcgccccgagccctcctcctgctgctctcgggaggcctggccctgaccgagacctgggcctgctcccactccatgaggtatttcgacaccgccgtgtcccggcccggccgcggagagccccgcttcatctcagtgggctacgtggacgacacgcagttcgtgcggttcgacagcgacgccgcgagtccgagaggggagccgcgggcgccgtgggtggagcaggaggggccggagtattgggaccgggagacacagaagtacaagcgccaggcacaggctgaccgagtgagcctgcggaacctgcgcggctactacaaccagagcgaggacgggtctcacaccctccagaggatgtctggctgcgacctggggcccgacgggcgcctcctccgcgggtatgaccagtccgcctacgacggcaaggattacatcgccctgaacgaggacctgcgctcctggaccgccgcggacaccgcggctcagatcacccagcgcaagttggaggcggcccgtgcggcggagcagctgagagcctacctggagggcacgtgcgtggagtggctccgcagatacctggagaacgggaaggagacgctgcagcgcgcagaacccccaaagacacacgtgacccaccaccccctctctgaccatgaggccaccctgaggtgctgggccctgggcttctaccctgcggagatcacactgacctggcagcgggatggggaggaccagacccaggacaccgagcttgtggagaccaggccagcaggagatggaaccttccagaagtgggcagctgtggtggtgccttctggacaagagcagagatacacgtgccatatgcagcacgaggggctgcaagagcccctcaccctgagctgggagccatcttcccagcccaccatccccatcatgggcatcgttgctggcctggctgtcctggttgtcctagctgtccttggagctgtggtcaccgctatgatgtgtaggaggaagagctcaggtggaaaaggagggagctgctctcaggctgcgtgcagcaacagtgcccagggctctgatgagtctctcatcacttgtaaagcctga

SEQ ID NO: 124 - DNA, 3636 bp, Homo sapiens
atggcttaccccttactcctctgcctcctgcttgctcagctgggattgggagctgttggcgccagccgcgacccccaaggacggccggattcccctcgagagaggaccccgaaggggaagccgcacgcccagcagccgggtcgagcctctgcctcggactcctcggctccctggagccgctccaccgatggcaccatcttggcgcagaaactcgccgaggaggtgcccatggacgtggcctcttacctctacaccggggactcccaccagctgaagcgagccaactgctccggccgctacgagttggcgggcctgccggggaagtggccagccctggccagcgcgcacccctccttgcaccgggcgctggacacactgacacacgccaccaacttcctcaacgtgatgctgcagagcaataagtcgcgggagcagaacttgcaggacgacctggattggtaccaggcgctggtgtggagccttctggagggcgagcccagcatctcccgggcggccatcaccttcagcaccgattcgctgtccgcaccggccccacaggtcttcctccaggccacgcgcgaggagagccgcatcctgctccaagacctgtcctcctccgcaccccacctggccaacgccactctggagaccgagtggttccacggcctccggcgcaagtggaggccccacttacaccgccgcggccccaatcaggggccccggggcctgggccacagctggcggcgcaaggacgggctcggcggggacaagagccacttcaagtggtctccgccttatctggagtgcgagaacgggagttacaagcccgggtggctggttactctttcctctgccatctacgggttgcagcctaacctggtcccggaattcaggggtgtcatgaaagttgacataaatcttcagaaagtggacattgaccaatgctcaagtgatggctggttttcaggaactcataaatgccacctcaacaattcagagtgtatgccaattaaaggcctaggattcgttcttggagcctatgagtgcatttgcaaagcaggattctatcatcctggagtcttaccagtgaacaactttcggagaaggggtccggatcagcatatttcaggaagtacaaaagatgtgtcagaagaagcctatgtctgcctaccttgcagggagggctgccccttctgtgctgatgacagcccatgcttcgtccaggaagataagtatttacgacttgccatcatctccttccaagccctgtgtatgctgctcgacttcgttagcatgctggtggtctaccactttcgcaaagcaaagagcatccgggcatcgggccttatcctgttggaaacgatcctttttggatctctgctcctatactttccagttgttattttgtactttgagccaagcacatttcgctgtattctcctaagatgggctcgtcttctcggttttgctactgtttacggaactgtcactctcaaacttcacagggttttgaaggtgtttctttcacgaacggctcaacgaattccatatatgactggcggacgggtcatgaggatgctggcagtaatactcttggtagtgttttggtttctcattggctggacttcatctgtgtgccagaatttggagaaacagatttcacttattggccaggggaaaacatccgatcacctcatcttcaatatgtgcctcattgaccgctgggactacatgacagcagttgctgaatttttattcctcttgtggggtgtttatctctgctatgcagtgcggacagtcccatcggcattccatgagccccgctatatggctgttgcagttcacaatgagctcatcatctctgctatattccatacaatttttgttcttgcctcaagacttcagtctgattggatgttgatgctgtattttgcacatactcatttgactgtgacagtcaccattgggttgcttttgattccaaagttttcacattcaagcaataacccacgagatgatattgctacagaagcatatgaggatgagctagacatgggccgatctggatcctacctgaacagcagtatcaattcagcctggagtgagcacagcttggatccagaggacattcgggacgagctgaaaaaactctatgcccaactggaaatatataaaagaaagaagatgatcacaaacaacccccacctccagaaaaagcggtgctcgaagaagggcctaggtcgttccatcatgagacgcattacggagatcccagagacagtcagccggcagtgctctaaagaggacaaggagggcgccgaccatggcacagccaaaggcactgccctcatcaggaagaaccccccagagtcttcagggaacacagggaaatccaaggaggagaccctgaaaaaccgagtcttctcactcaagaaatcccacagcacttatgaccacgtgagagaccaaacggaagagtccagtagcctacccacagaaagccaagaggaggagacaacagaaaattccacactggaatccctgtcgggtaaaaaactaacacaaaaactaaaagaagacagcgaggctgagtccacggagtcggtgccgttggtgtgcaagtcagcaagcgctcacaacctcagctcagagaagaaaactgggcacccacgaacatcgatgttacagaagtctctcagtgtcatagcaagcgccaaggagaagactcttggattagctgggaaaacccaaacagcaggtgtggaagaacgcactaaatcccagaaacctttgccaaaagataaagagacaaacagaaatcactcaaattctgataacacagagactaaagatcctgccccccaaaactcaaatcctgcggaggagccaagaaagcctcagaaatctgggattatgaaacaacaaagggtcaaccccaccactgccaattctgacctgaacccaggcaccacccagatgaaggacaactttgacattggggaggtgtgtccttgggaggtttatgacctgacccctggtcctgtgccttcagaatcaaaagttcaaaagcacgtatctattgtggcttctgaaatggagaaaaaccccactttttccttaaaggagaaatctcaccacaagcctaaggcagctgaggtttgtcagcaatccaatcagaagcgcatagataaggctgaagtatgcctttgggagagccaaggccagtccattttggaagatgagaagcttttgatttccaagactccagttctcccagagagggcaaaagaggagaacggaggtcagcctcgtgcagccaatgtgtgtgctgggcagagcgaagaactgccccccaaagctgtagcatcaaaaacagagaatgaaaatctcaaccaaataggacaccaggaaaaaaagacatcttcttctgaggagaatgtgcgtggctcctataactcaagtaataacttccagcaacctttaacatcacgagcagaggtttgtccttgggagtttgagaccccagctcaaccaaatgctggaagaagtgtagctttacctgcctcttctgctctaagtgcaaataagatagcagggcctaggaaagaagagatctgggatagttttaaagtgtag

SEQ ID NO: 125 - DNA, 4233 bp, Homo sapiens
atggcatcgatatcagagcctgttacattcagagagttctgcccgttgtactatctcctcaatgccattccgacaaagatccagaagggtttccgctctatcgtggtctatctcacggccctcgacaccaacggggactacatcgcggtgggcagcagcatcggcatgctctatctgtactgccggcacctcaaccagatgaggaagtacaactttgaggggaagacggaatctatcactgtggtgaagctgctgagctgctttgatgacctggtggcagcaggcacagcctctggcagggttgcagtttttcaacttgtatcttcattgccagggagaaataaacagcttcggagatttgatgtcactggtattcacaaaaatagcattacagctctggcttggagccccaatggaatgaaattgttctctggagatgacaaaggcaaaattgtttattcttctctggatctagaccaggggctctgtaactcccagctggtgttggaggagccatcttccattgtgcagctggattatagccagaaagtgctgctggtctctactctgcaaagaagtctgctcttttacactgaagaaaagtctgtaaggcaaattggaacacaaccaaggaaaagtactgggaaatttggtgcttgttttataccaggactctgtaagcaaagtgatctaaccttgtatgcgtcacggcccgggctccggctatggaaggctgatgtccacgggactgttcaagccacgtttatcttaaaagatgcttttgccgggggagtcaagccttttgaactgcacccgcgtctggaatcccccaacagtggaagttgcagcttacctgagaggcacctggggcttgtttcatgtttctttcaagaaggctgggtgctgagttggaatgaatatagtatctatctcctagacacagtcaaccaggccacagttgctggtttggaaggatccggtgatattgtgtctgtttcgtgcacagaaaatgaaatatttttcttgaaaggagataggaacattataagaatttcaagcaggcctgaaggattaacatcaacagtgagagatggtctggagatgtctggatgctcagagcgtgtccacgtgcagcaagcggagaagctgccaggggccacagtttctgagacgaggctcagaggctcttccatggccagctccgtggccagcgagccaaggagcaggagcagctcgctcaactccaccgacagcggctccgggctcctgccccctgggctccaggccacccctgagctgggcaagggcagccagcccctgtcacagagattcaacgccatcagctcagaggactttgaccaggagcttgtcgtgaagcctatcaaagtgaaaaggaagaagaagaagaagaagacagaaggtggaagcaggagcacctgtcacagctccctggaatcgacaccctgctccgaatttcctggggacagtccccagtccttgaacacagacttgctgtcgatgacctcaagtgtcctgggcagtagcgtggatcagttaagtgcagagtctccagaccaggaaagcagcttcaatggtgaagtgaacggtgtcccacaggaaaatactgaccccgaaacgtttaatgtcctggaggtgtcaggatcaatgcctgattctctggctgaggaagatgacattagaactgaaatgccacactgtcaccatgcacatgggcgggagctgctcaatggagcgagggaagatgtgggaggcagtgatgtcacgggactcggagatgagccgtgtcctgcagatgatggaccaaatagcacacagttacccttccaagaacaggacagctctcctggggcgcatgatggggaagacatccaacccattggcccccaaagcactttttgtgaagtccccctcctgaactcactcactgtgccttccagcctcagctgggccccaagtgctgaacagtggctgcctgggaccagagctgatgaaggcagccccgtggagcccagccaagagcaggacatcctaaccagcatggaggcctctggccacctcagcacaaatctctggcatgctgtcactgatgatgacacaggtcagaaagaaatacccatttctgaacgtgtcttggggagtgtgggaggacagctgactccggtctctgccttggcagccagcactcacaagccctggcttgagcagcctccacgggatcagacattgacgtccagcgatgaggaggacatctatgcccacgggcttccttcttcatcctcagagacgagtgtgacagagctcggacctagttgctcccagcaggacctgagccggctgggtgcagaggacgccgggctgctcaagccagatcagtttgcagaaagctggatgggctactcgggtcccggctatggcatcctcagcttggtggtctccgagaagtatatctggtgcctggactacaaaggcggcctgttctgcagcgcgttgccgggcgccgggctgcgctggcagaagtttgaagatgctgtccagcaggtggcagtctcgccctcaggagcccttctctggaagattgaacagaaatctaaccgggcttttgcttgtgggaaagtcaccatcaaggggaagcggcactggtacgaagccctgccccaggcagtgtttgtggccctgagcgatgacacggcctggatcatcaggaccagtggggacctatacttgcagacaggtctgagcgtggatcgcccttgtgccagagccgtaaaggtggactgtccctacccgctgtcccagatcacagcccggaacaatgtggtgtgggcgctgacagagcagagggccctcctgtaccgggagggcgtgagcagcttctgtccggaaggcgagcagtggaagtgtgacattgtcagcgaaaggcaagctttagaacccgtctgcataacgctcggggatcagcagactctctgggccctggacatccatgggaacctgtggttcagaactggcattatttccaagaagccccaaggagatgacgaccattggtggcaagtgagcatcacggactatgtggtgtttgaccagtgcagcttatttcagacgataatccatgccactcactcggtggccacagcagcccaagcccccgtagaaaaggtggcagataagctgcgcatggcgttttggtcccagcagcttcagtgccagccaagccttctcggggtcaataacagcggtgtctggatctcctcgggcaagaatgaattccacgtcgctaagggaagtctcataggcacctactggaatcatgtggttccccgtgggacagcttctgctacaaaatgggcctttgtgttggcttctgcagctcccacgaaggaaggtggcttcctgtggctgtgccagagcagcaaggacctgtgcagcgtcagcgcccagagcgcacagtcgcggccctccacggtgcagctgcctcccgaagccgagatgcgcgcctatgccgcctgccaggatgcgctgtgggcgctggacagcctcggccaggtgttcatcaggacgctctccaagagctgccccacgggcatgcactggaccaggctggacctctcccagctaggagctgtaaaattgacaagcttggcatgtggaaatcagcacatctgggcctgtgattccaggggtggagtttacttccgtgtagggactcagcctctcaatcccagtctcatgcttccagcctggataatgattgagccacctgtccagcccgccggggtcagcttggtcagcgtccattccagccccaacgaccagatgctgtgggtgcttgacagcaggtggaacgtgcacgtgcggaccgggatcaccgaggagatgcctgtggggaccgcctgggagcatgtgccagggttgcaggcctgccagctggcgctgagcaccaggaccgtgtgggcccgctgtccaaacggagacctcgcccggcggtacggcgtcacagacaagaaccccgccggggactactggaagaaaattcccggcagcgtgtcgtgtttcacaactgcgtcagatgagctgtgggctgtgggcccgcccggctacctcctccaacggctgacaaagacgttcagccactcgcacggcacccagaagagcagccaggccgccatgccccaccctgaggacctggaggacgagtgggaggtcatctga

SEQ ID NO: 126 - DNA, 645 bp, Homo sapiens
atgaacgtgttccgaatcctcggcgacctgagccacctcctggccatgatcttgctgctggggaagatctggaggtccaagtgctgcaagggcatctctgggaagagccagatcctgtttgctctcgtcttcaccaccaggtacctggacctgttcaccaacttcatctccatctacaacacagtaatgaaggtggtttttctcctctgtgcctatgttacagtgtacatgatatatgggaaattccgtaaaacttttgacagtgagaatgacacattccgcctggagtttcttctggtcccagtcattggcctttccttccttgaaaactacagtttcactctgctggagatcctctggactttctctatctatctggaatcagtggctatcctgccccagctcttcatgatcagcaagactggagaggctgagaccataactactcactacctgttctttctgggtctgtaccgggcactctacctggctaactggatcaggcggtaccagactgagaatttctatgaccaaattgcagtcgtgtctggagtagtacaaaccatcttctactgtgacttcttctacttgtatgtgaccaaagtccttaagggaaagaagttaagtcttccaatgccaatctga

SEQ ID NO: 127 - DNA, 9939 bp, Homo sapiens
atgatggcgaggcggccgccgtggcggggcctcgggggacggtcgacccccatactcctgctccttctcctctctttgttccccctcagccaggaggagctggggggcggtgggcaccagggctgggacccaggcttagctgccactacggggccaagggcgcatatcggtggcggagccttagctctttgtccggagtcttccggggtccgggaggatggggggcctggcctgggggtcagggagcctatcttcgtggggctccgagggagaaggcaaagcgcccggaatagtcgagggccccctgagcagccgaatgaggagctggggattgaacacggcgtccagccattgggcagccgcgaacgagagacaggacagggaccagggtctgtgttatactggcgcccagaggtctcctcttgcgggcggacaggacctttgcaaagaggtagtctgtcaccaggggctctgtcctcaggggtcccgggctcggggaacagctcgcccctcccttcagactttttgattcggcaccacggtcccaagccggtgtcctcccagcggaacgctgggacaggctcccgcaaaagagtgggcaccgcgcgctgctgtggggaattatgggcaacagggagcaagggtcagggcgagagagccacgacatccggagcagaaaggacagccccccggcggaactgtcttccaggggcctcgggatctggccccgagctggattcagcaccacgcacggcgaggacagctcctgcatcaggttcagcaccccgcgagtctcggacagctcccgagccggcgcccaagcgcatgcgctcccggggtctcttccgctgccgcttcctcccgcagcgccccgggccgcgtcccccgggactcccggcccgtcctgaagccaggaaagtaacctcggcgaaccgggcacgctttcgtcgcgccgcaaaccgccacccgcagtttccgcagtacaactaccagacgctggtgccggagaatgaggcagcaggcaccgcggtgctacgcgtggttgctcaggacccggacgccggcgaggccgggcgcctagtctactcgctggcggcactcatgaacagccgctcgctggagctgttcagcatcgacccgcagagcggccttatccgtacggcggcagctctggaccgcgagagcatggagcgtcactacctgcgtgtgaccgcgcaggaccacgggtcgccgcgcctctcggccaccacgatggtggccgtgacagtagccgaccgcaacgaccactcgccggtttttgagcaagcgcagtaccgggagacccttcgcgagaatgtggaggagggctaccctatcctgcagctgcgtgccactgacggcgacgcgccccccaacgccaacctgcgctaccgcttcgtggggccgccagctgcgcgcgctgcagctgccgccgccttcgagattgatccacgctccggcctcatcagcaccagcggccgagtggaccgcgagcacatggaaagctatgagctggtggtggaagccagcgaccagggccaggaacccgggccgcgctcggccactgtgcgcgtacacataactgtgctagacgagaacgacaatgctcctcagttcagcgagaagcgctacgtggcgcaggtgcgcgaggatgtgcgcccccacacagtcgtgctgcgcgtcacggccactgaccgggacaaggacgccaacggattggtgcactacaacatcatcagtggcaatagccgtggacactttgccatcgacagcctcactggcgagatccaggtggtggcacctctggacttcgaggcagagagagagtatgccttgcgcatcagggcgcaggatgctggccggccaccgctgtccaacaacacgggcctggccagcatccaggtggtggacatcaatgaccacattcctatttttgtcagcacgcccttccaagtttctgtcttggaaaatgctcccttgggtcactcagtcatccacattcaggcagtcgatgcagaccatggggagaatgccagattggagtactccctaactggtgtggcacctgatactccttttgtgataaacagcgccactggctgggtctctgtgagtggtcccctggaccgtgagtctgtggagcattacttctttggtgtggaggctcgagaccatggctcacccccactctctgcctcagccagtgtcaccgtgactgtgctggacgttaatgacaatcggcctgagttcacaatgaaggagtaccacctacgactgaatgaggatgcagctgtgggcaccagtgtggtcagcgtgaccgcagtagaccgtgatgccaacagtgccatcagctaccagatcacaggcggcaacacccggaatcgctttgccatcagcacccaggggggtgtgggtctggtgactctggctctgccactggactacaagcaggaacgctacttcaagctggtactaactgcatctgaccgtgcccttcatgatcactgctatgtgcacatcaacatcacagatgccaacactcatcggccggtctttcaaagtgcccactactcagtgagtgtgaatgaagatcggccaatgggtagcaccatagtggtcatcagtgcctctgatgatgacgtgggtgagaatgctcgtatcacctatctcctggaggacaacctgccccagttccgcattgatgcagactcaggagccattacattacaggccccattagactatgaggaccaggtgacctacaccctggctatcacagctcgggacaatggcatcccacagaaggcagacactacttatgtggaggtgatggtcaatgacgtgaatgacaatgctccacaatttgtggcctcccactatacagggctggtctctgaggatgccccacctttcaccagtgtcctgcagatctcagccactgaccgggatgctcatgccaatggccgggtccagtacactttccagaatggtgaagatggggatggagattttaccattgagcccacctctggaattgtccgtacagtaaggcggctagaccgggaggcagtatcagtgtatgagttgactgcctacgcagtggacagaggtgtgcccccactccggactccagtcagtatccaggtgatggtgcaggatgtgaacgacaatgcacctgtcttcccagctgaggagtttgaggtgcgggtgaaagagaatagcattgtgggctcagtggtggcccagatcactgcagtggaccctgacgaaggccccaatgcccatataatgtaccagatcgtggaggggaacatccctgagctgttccaaatggacatcttctctggagaactgacggcactcattgacctagactatgaggctcgccaagaatatgtgattgtggtgcaggccacatctgctcctttggtcagccgggccactgtgcacgtccgcctggttgaccagaatgacaacagccctgtgctcaacaacttccagatcctcttcaacaactatgtatccaaccgttcagacaccttcccgtcgggcattattgggcgcatcccagcttatgaccccgatgtctccgaccacctcttctactcctttgagcgtggcaatgagctgcagctgctggtagtcaaccagaccagtggggagctgcgactcagccgaaagctagacaataaccgcccactggtggcctccatgttggtgactgtcacagatggcctgcacagcgtgacggcgcagtgtgtgctgcgcgtggtcatcatcacggaggagttgctggccaacagcctgaccgtgcgccttgagaacatgtggcaggagcgcttcctgtcaccgctgctgggccgcttcctcgagggcgtggctgcggtgctcgctacgcccgctgaggacgtcttcatcttcaacatccagaacgacacagacgtagggggcaccgtgctcaatgtgagtttctcggcgctagctccacgtggggccggggcgggcgctgcagggccctggttcagctccgaggagctgcaggagcagttgtacgtgcgccgggcggcgctggcggctcgctccctgctcgacgtactgcccttcgacgacaacgtgtgcctgcgagagccctgtgagaactacatgaaatgcgtgtccgtgctccgctttgactcgtccgcgcccttcctggcctcggcctccacgctgttccgacccatccagcccatcgctggcctgcgctgccgctgcccgcccggattcacgggagacttttgcgagaccgagctcgacctctgctactccaacccatgtcgcaacggcggagcctgcgcgcggcgcgagggaggctacacgtgcgtctgccgcccgcgcttcaccggagaggactgcgagctggacaccgaggccggccgctgcgtgccgggcgtctgccgcaacgggggcacctgcaccgacgcgcccaacggcggctttcgctgccagtgcccggcaggcggcgccttcgagggcccgcgctgcgaggtggctgcgcgctccttcccgcccagttcgttcgtcatgtttcgcggcctgcggcagcgattccaccttacgctgtccctctcgttcgcgacagtgcagcagagcgggctgctcttctacaacgggcgcctgaacgagaagcacgacttcctggccctggaactcgtggctggccaagtgcggctcacatattccacgggtgaatccaacaccgtggtcagccccacagttccagggggcttgagtgacgggcaatggcatacagtgcatctgagatactacaacaagccccggacagatgccctagggggtgcacagggcccctccaaggacaaggtggctgtgctaagcgtggatgattgtgatgtggccgtggctctgcagtttggtgctgagattggcaactactcatgcgcggctgctggtgtgcaaacaagctccaagaagtccctggacctgacgggccctcttcttctgggaggtgtccccaacctccccgagaacttccccgtatcccataaggacttcatcggctgtatgcgggacctgcacattgatggccgccgagtggacatggcggcttttgtcgcaaataatggcaccatggcaggctgccaagccaagctacacttttgtgactcaggcccctgcaagaacagtggcttctgctcggagcgctggggcagcttcagctgcgactgccctgtgggcttcggcggcaaagactgtcagcttactatggcccatccccaccatttccgtggcaacggcacactgagctggaactttggaagtgacatggctgtgtctgtgccatggtacctggggctggcatttcggacacgggcaacgcagggggtcctgatgcaagtgcaggctgggccacacagcacgctcctttgccagctagatcgggggttactgtctgtgacagtgaccaggggctcgggccgtgcttcccatctccttctggaccaggtgactgtcagtgatggccggtggcacgatctgcggctggagttgcaggaggaaccaggtggccggcggggccaccatgtccttatggtctcactggactttagcctcttccaggacaccatggcggtggggagtgagctgcagggcctgaaggtaaagcagctccacgtgggaggcctgccccccggcagtgcagaggaggctcctcagggtctggttggctgcatccagggggtgtggctcggctccacaccctctggctccccggccctgctaccccccagccaccgagtgaatgcggagcctggctgtgttgtgaccaacgcctgtgcctctgggccctgcccacctcacgcagactgccgggacctctggcagaccttttcttgcacctgccagccaggttactacggcccaggctgtgtggatgcctgcctcctgaacccctgtcagaaccagggatcatgccggcacctgccaggagccccccatggctatacctgtgactgtgtgggtggctatttcgggcaccactgtgagcacaggatggaccagcagtgcccacggggctggtgggggagcccaacctgtggcccctgcaactgtgatgttcacaaaggttttgatcccaactgcaacaagacaaatgggcagtgtcactgcaaggagttccactaccgaccgcggggcagtgactcttgcctcccatgtgactgctaccctgtgggctccacctcgcgctcatgtgcaccccacagcgggcagtgcccctgtcgcccaggagcccttggccgccagtgcaacagctgtgacagtcccttcgcagaggtgacagccagcggctgccgggtgctctatgatgcctgccctaagtccctgagatctggtgtgtggtggccccagacaaagtttggcgtcctggccacagtgccctgtccccggggggccctgggtgctgctgtgcggctgtgtgatgaggcccagggttggctggagcccgacctcttcaactgtacctcccctgcctttcgagagctcagtctgctgctggatggcctagagctgaacaagacggcactggataccatggaggccaagaagctggctcagcggctacgggaggtgactggccacactgaccactattttagccaagatgttcgagtcactgcccgcctgctggcccacctgctggccttcgagagccatcagcagggcttcgggctgacagccacacaggatgcccacttcaatgagaatctgctgtgggccggctctgcactgcttgccccagagacaggggacttgtgggcggcgctggggcagcgggcccctgggggctccccaggcagcgcgggactggtgaggcacctggaggagtatgcagccacactcgcaaggaatatggaactcacatacctgaatcccatggggctggtgacgcctaatatcatgctcagcattgaccgcatggagcaccccagttctccccggggggcccgtcgctaccctcgctaccatagcaacctctttcgaggccaggatgcctgggatcctcacacccatgtgctgctgccttcccagtccccacggccatccccatctgaagttctgcccacaagcagcagcatagaaaactccaccacctcaagtgtggtccccccaccagccccgccagagccagagcctgggatctccattatcattctcctcgtttaccgcaccttagggggactgctccctgcccagttccaggcagaacgccgaggtgccaggcttcctcagaaccccgtcatgaactccccggtggtcagcgtggctgtgttccacggacgcaacttcctaaggggaatcctggagtcccccatcagcctagagtttcgcctgctacagacagcgaatcggagcaaggcgatctgtgtgcagtgggacccacctggcctggcggagcagcatggtgtgtggacagcacgggactgcgagctggtgcacaggaatgggtcccacgcacggtgtcgctgcagccggacagggacctttggggtcctcatggatgcctctccccgtgagaggctggagggcgacctggagctgctggctgtgttcacccacgtggtcgtggctgtgtctgtggctgcgctggtgctgactgcagccatcctgctgagcctgcgcagcctcaagtccaatgtgcgtgggatccatgccaatgtggcagccgccctgggggtggcagagctcctcttcctgctggggattcacaggacccacaatcagctggtgtgcactgcagtcgccatcctcctgcactacttcttcctcagcaccttcgcgtggctcttcgtgcaggggctgcacctctaccgcatgcaggttgagccacgcaacgtggaccgcggcgccatgcgcttctaccatgccctgggctggggcgtccctgctgtgctgctgggccttgctgtgggcctggaccctgagggctatgggaaccctgacttctgctggatctcagtccacgagcccctcatctggagctttgctggccctgttgtcctggtcatagtgatgaacgggaccatgtttctcctcgctgcccgcacatcctgctccacagggcagagggaggccaagaagacctctgcactgacccttcgcagctccttcctgctgcttctgctggtcagtgcctcctggctctttgggctcctggcagtcaaccacagcatcctagccttccactacctccatgctggactctgcggcctccagggcctggcggtgctgctgctcttctgtgtcctaaatgcagatgctcgggctgcctggatgccagcctgtctgggcaggaaggcagcgcctgaggaggcaaggccagcacctgggctgggacctggggcctacaacaacacggctctctttgaggagagtggcctcatccgcatcactctgggcgcctccaccgtctcctctgtgagcagtgcccgctccggccggacccaggaccaggacagccagcggggccgcagctacctcagggacaatgtcctggttcgacatggctcagccgctgaccacactgaccacagcctccaggctcatgctggccccactgacctggacgtggccatgttccatcgagatgctggcgcagactccgactctgacagtgacctgtccttggaggaggagaggagtctctccattccatcttcagaaagcgaggacaatggccggacgcgggggcgcttccaacggccactctgccgagcagcccagagtgagaggctcctcacccaccccaaagatgtggatggcaatgacctcctgtcctactggccagccctgggggagtgcgaggcagccccctgtgctctgcagacttggggctctgaaaggcgcctggggctggacaccagcaaggatgcagctaacaacaaccagccagacccggccctgaccagtggggatgagacttctctgggccgggcccagcgccagaggaaaggcatcctgaagaaccggttgcaatacccactggtgccacagacccgaggtgcccctgagctgtcctggtgccgtgcagccaccttgggccaccgtgctgtgccagctgcctcttacggtcgcatctatgctggcgggggcacgggcagcctttcacagccagccagccgctactcttctagagaacagctggacctgctcctccggcggcaactgagccgtgagcgactagaggaagcccctgcccctgttctacgtcccctgagccggccagggtcccaggaatgcatggatgctgcaccaggccgactggagcccaaagatcggggcagcaccctgccacggaggcagccacctcgggactaccctggcgccatggctggccgcttcgggtcacgggatgcgctcgacttaggggcacctcgagagtggttgagcacgctgcctccgccccgccgcacccgggaccttgacccacagcccccacctctgcccctgtctccccagcggcaactctcaagggaccccctcttgccatcccggccgctggactctctgtctaggagctcgaactctcgggagcagctggaccaggtgcctagccggcacccctcacgagaagcccttgggccactcccgcagctgctcagagctagggaggactcggtcagtggccccagccatggcccctccacagaacagttggacattctttcctccatccttgcctctttcaactcctcggccctctcctctgtgcaatcttcaagcacacccttgggccctcacaccactgccacaccttctgccacagcctctgtgcttgggccctccacgccacgttctgccacgtctcacagcatctcggagctgtcgccagactcagaagttcccagaagtgagggtcactcctga

SEQ ID NO: 128 - DNA, 408 bp, Homo sapiens
atggccacagttcagcagctggaaggaagatggcgcctggtggacagcaaaggctttgatgaatacatgaaggagctaggagtgggaatagctttgcgaaaaatgggcgcaatggccaagccagattgtatcatcacttgtgatggtaaaaacctcaccataaaaactgagagcactttgaaaacaacacagttttcttgtaccctgggagagaagtttgaagaaaccacagctgatggcagaaaaactcagactgtctgcaactttacagatggtgcattggttcagcatcaggagtgggatgggaaggaaagcacaataacaagaaaattgaaagatgggaaattagtggtggagtgtgtcatgaacaatgtcacctgtactcggatctatgaaaaagtagaataa

SEQ ID NO: 129 - DNA, 1533 bp, Homo sapiens
atgccccgcggcttcctggtgaagcgcagcaagaagtccacgcccgtttcctaccgggtccgcggcggcgaggacggcgaccgcgcactgctgctctcgcccagctgcgggggcgcccgcgccgagcccccggcgccgagcccggtccccgggccgctgccgccgccgccgcccgcggagcgcgcccatgcagcgctcgccgccgcgcttgcctgcgcgcctgggccgcagccacccccgcagggcccgcgggccgcgcacttcggcaaccccgaggctgcgcaccccgcgccgctctacagtcccacgcggcccgtgagccgcgagcacgagaagcacaagtacttcgaacgcagcttcaacctgggctcgccggtctcggccgagtccttccccacgcccgccgcgctgctcggagggggcggcggcggcggcgcgagcggagctggcggaggcggcacctgcggcggcgacccgctgctcttcgcgcccgccgagctcaagatgggcacggcgttctcggctggcgccgaggcggcccgcggcccgggccccggccccccactgccccctgccgccgccctgcggcccccgggaaagcggcccccgccccctaccgccgcggagccgcccgccaaggcagtcaaggccccgggcgccaagaagcccaaggccatccgcaagctgcacttcgaggacgaggtgaccacgtcgcccgtgctggggctcaagatcaaggagggcccggtggaggcgccgcggggccgcgcggggggcgcggcgcggccgctgggcgagttcatctgccagctgtgcaaggaggagtacgccgacccgttcgcgctggcgcagcacaaatgctcgcgcatcgtgcgtgtggagtaccgctgtcccgagtgcgccaaggtcttcagctgcccggccaacctggcctcgcaccgccgctggcacaaaccgcggcccgcgcccgccgccgcccgcgcgccggagccagaagcagcagccagggctgaggcgcgggaggcacccggcggcggcagcgaccgggacacgccgagccccggcggcgtgtccgagtcgggctccgaggacgggctctacgagtgccatcactgcgccaagaagttccgccgccaggcctacctacgcaagcacctgctggcgcaccaccaggcgctgcaggccaagggcgcgccgctagcgcccccggccgaggacctactggccttgtaccccgggcccgacgagaaggcgccccaggaggcggccggcgacggcgagggggccggcgtgctgggcctgagtgcgtccgccgagtgccacctgtgcccagtgtgcggagagtcgttcgccagcaagggcgctcaggagcgccacctgcgcctgctgcacgccgcccaggtgttcccctgcaagtactgcccggccaccttctacagctcgcccggccttacgcggcacatcaacaagtgccacccatccgaaaacagacaggtgatcctcctgcaggtgcccgtgcgcccggcctgctag

SEQ ID NO: 130 - DNA, 1461 bp, Homo sapiens
atgctccaccttagcgagttttccgaacccgacgcgctcctcgtcaagtccactgaaggctgttgcgccgaacccagcgctgaattgccccggctgcctgccagggacgctcccgcggccaccggctaccctggagcaggcgacttcttgagctgggctttgaacagctgcggcgcaagtggggacttagccgactcctgcttcctggaggggcctgcgcccacaccccctcccggcctcagctacagcggtagcttcttcattcaggcagtgcccgaacacccgcacgacccggaggcactcttcaacctcatgtcgggcatcttaggcctggcacccttccccggtccagaggcagcagcgtccagatccccgctggatgccccttttcctgcggggtccgatgccttgctgccgggtccgccggacctttactccccggatctgggcgctgcccctttcccagaggcgttctgggaggcctcgccttgcgcgggtgccccctcgcagtgcctgtatgagcctcagctctccccgcccgacgtcaagcccggcctccgggcgcctcccgcctcgccagcgctggacgctgtctctgccttcaagggtccctacgcgccctgggagctgctttctgtgggggccccagggaactgtgggtcacagggagactaccaggccgccccggaggctcgttttcccgtaatagggaccaagattgaggacttgctgtccatcagctgccctgcggaactgccggccgtcccagccaacagactctatcccagcggggcctatgacgctttcccgctggccccgggtgacttaggggagggggctgagggcctccctgggctcctgacccctcctagtggggagggagggagtagcggcgacggcggagagtttctggccagtacgcagcctcagctttccccgctgggccttcgcagcgccgccgcggcggacttccctaaacctctggtggcggacatccctggaagcagtggcgtggctgcaccacccgtgccgccgccgccgcccacccctttcccccaggccaaggcgcgacgcaaggggcgccgcggcggcaaatgcagcacgcgctgcttctgcccgcggccgcacgccaaggccttcgcttgcccggtggagagttgtgtgcggagctttgcgcgctccgacgagctcaatcgccacctgcgcatccacacgggccacaaacccttccagtgccgcatctgcctccgcaacttcagccgcagcgaccacctcaccacgcacgtgcgcacccacaccggcgagaagccttttgcttgcgacgtgtgcggccgccgcttcgcgcgcagcgatgagaagaaacggcacagcaaggtgcacctcaagcagaaggcgcgcgccgaggagcggctcaagggcctcggcttttactcgctgggcctctccttcgcttctctctga

SEQ ID NO: 131 - DNA, 1110 bp, Homo sapiens
atggaaggttccctggaacgggaggcgccagcgggggcgctggccgccgtgctaaagcacagctcgacgttgccgcccgaaagcacccaggtccggggctacgacttcaaccgcggtgtgaattaccgcgcactgctggaggccttcggcaccaccggcttccaagcaaccaacttcgggcgcgctgtacagcaagtcaatgccatgatcgagaagaagctggaaccactgtcacaggatgaagaccagcacgcggacctgacccagagccgccgcccacttaccagctgcaccattttcctgggatatacatccaacctcatcagttcaggcatccgtgagaccattcgctaccttgtgcagcacaacatggtggacgtattggtgaccacagctggcggcgtggaggaagacctcatcaagtgcctggcgcccacatacttgggcgagtttagcctcagggggaaggagctccgggagaacgggatcaataggatcggaaacctgctggtgcccaatgagaattactgcaagtttgaggactggctgatgcccattctggaccagatggtgatggagcagaacacagagggtgtaaagtggacgccttctaagatgatcgcccggctgggcaaggagatcaacaacccagagtccgtgtattactgggcccagaagaaccacatccctgtgtttagtcccgcacttacagacggctcgctgggcgacatgatcttcttccattcctacaagaacccgggcctggtcctggacatcgttgaggacctgaggctcatcaacacacaggccatctttgccaagtgcactgggatgatcattctgggcgggggcgtggtcaagcaccacattgccaatgccaacctcatgcggaacggggccgactacgctgtttacatcaacacagcccaggagtttgatggctctgactcaggtgcccgaccagacgaggctgtctcctggggcaagatccgggtggatgcacagcccgtcaaggtctatgctgacgcctccctggtcttccccctgcttgtggctgaaacctttgcccagaagatggatgccttcatgcatgagaagaacgaggactga

SEQ ID NO: 132 - DNA, 1443 bp, Homo sapiens
atgaagcgctcggtagccgtctggctcttggtcgggctcagcctcggtgtcccccagttcggcaaaggtgatatttgtgatcccaatccatgtgaaaatggaggtatctgtttgccaggattggctgatggttccttttcctgtgagtgtccagatggcttcacagaccccaactgttctagtgttgtggaggttgcatcagatgaagaagaaccaacttcagcaggtccctgcactcctaatccatgccataatggaggaacctgtgaaataagtgaagcataccgaggggatacattcataggctatgtttgtaaatgtccccgaggatttaatgggattcactgtcagcacaacataaatgaatgcgaagttgagccttgcaaaaatggtggaatatgtacagatcttgttgctaactattcctgtgagtgcccaggcgaatttatgggaagaaattgtcaatacaaatgctcaggcccactgggaattgaaggtggaattatatcaaaccagcaaatcacagcttcctctactcaccgagctctttttggactccaaaaatggtatccctactatgcacgtcttaataagaaggggcttataaatgcgtggacagctgcagaaaatgacagatggccgtggattcagataaatttgcaaaggaaaatgagagttactggtgtgattacccaaggagccaagaggattggaagcccagagtatataaaatcctacaaaattgcctacagtaatgatggaaagacttgggcaatgtacaaagtgaaaggcaccaatgaagacatggtgtttcgtggaaacattgataacaacactccatatgctaactctttcacaccccccataaaagctcagtatgtaagactctatccccaagtttgtcgaagacattgcactttgcgaatggaacttcttggctgtgaactgtcgggttgttctgagcctctgggtatgaaatcaggacatatacaagactatcagatcactgcctccagcatcttcagaacgctcaacatggacatgttcacttgggaaccaaggaaagctcggctggacaagcaaggcaaagtgaatgcctggacctctggccacaatgaccagtcacaatggttacaggtggatcttcttgttccaaccaaagtgactggcatcattacacaaggagctaaagattttggtcatgtacagtttgttggctcctacaaactggcttacagcaatgatggagaacactggactgtataccaggatgaaaagcaaagaaaagataaggttttccagggaaattttgacaatgacactcacagaaaaaatgtcatcgaccctcccatctatgcacgacacataagaatccttccttggtcctggtacgggaggatcacattgcggtcagagctgctgggctgcacagaggaggaatga

SEQ ID NO: 133 - DNA, 1491 bp, Homo sapiens
atgaaacacctgtggttcttcctcctgctggtggcagctcccagatgggtcctgccccaggtgcagctgcaggagtcgggcccaggactggtgaagccttcacagaccctgtccctcacctgtactgtctctggtggctccatcagcagtggtggttactactggagctggatccgccagcacccagggaagggcctggagtggattgggtacatctattacagtgggagcacctactacaacccgtccctcaagagtcgagttaccatatcagtagacacgtctaagaaccagttctccctgaagctgagctctgtgactgccgcggacacggccgtgtattactgtgcgagagacacaatgaggggaggtgagtgtggggctgtagatactcactggggccagggcaccctggtcaccgtctcctcagcatccccgaccagccccaaggtcttcccgctgagcctctgcagcacccagccagatgggaacgtggtcatcgcctgcctggtccagggcttcttcccccaggagccactcagtgtgacctggagcgaaagcggacagggcgtgaccgccagaaacttcccacccagccaggatgcctccggggacctgtacaccacgagcagccagctgaccctgccggccacacagtgcctagccggcaagtccgtgacatgccacgtgaagcactacacgaatcccagccaggatgtgactgtgccctgcccagttccctcaactccacctaccccatctccctcaactccacctaccccatctccctcatgctgccacccccgactgtcactgcaccgaccggccctcgaggacctgctcttaggttcagaagcgaacctcacgtgcacactgaccggcctgagagatgcctcaggtgtcaccttcacctggacgccctcaagtgggaagagcgctgttcaaggaccacctgagcgtgacctctgtggctgctacagcgtgtccagtgtcctgccgggctgtgccgagccatggaaccatgggaagaccttcacttgcactgctgcctaccccgagtccaagaccccgctaaccgccaccctctcaaaatccggaaacacattccggcccgaggtccacctgctgccgccgccgtcggaggagctggccctgaacgagctggtgacgctgacgtgcctggcacgcggcttcagccccaaggatgtgctggttcgctggctgcaggggtcacaggagctgccccgcgagaagtacctgacttgggcatcccggcaggagcccagccagggcaccaccaccttcgctgtgaccagcatactgcgcgtggcagccgaggactggaagaagggggacaccttctcctgcatggtgggccacgaggccctgccgctggccttcacacagaagaccatcgaccgcttggcgggtaaacccacccatgtcaatgtgtctgttgtcatggcggaggtggacggcacctgctactga

SEQ ID NO: 134 - DNA, 1509 bp, Homo sapiens
tttctgagactcatggacctcctgcacaagaacatgaaacacctgtggttcttcctcctgctggtggcagctcccagatgggtcctgtcccaggtgcagctgcaggagtcgggcccaggactggtgaagccttcggagaccctgtccctcacctgcactgtctctggtggctccatcagtagttactactggagctggatccggcagcccgccgggaagggactggagtggattgggcgtatctataccagtgggagcaccaactacaacccctccctcaagagtcgagtcaccatgtcagtagacacgtccaagaaccagttctccctgaagctgagctctgtgaccgccgcggacacggccgtgtattactgtgcgagagacacaaggctgtgctactggtacttcgatctctggggccgtggcaccctggtcactgtctcctcagcatccccgaccagccccaaggtcttcccgctgagcctctgcagcacccagccagatgggaacgtggtcatcgcctgcctggtccagggcttcttcccccaggagccactcagtgtgacctggagcgaaagcggacagggcgtgaccgccagaaacttcccacccagccaggatgcctccggggacctgtacaccacgagcagccagctgaccctgccggccacacagtgcctagccggcaagtccgtgacatgccacgtgaagcactacacgaatcccagccaggatgtgactgtgccctgcccagttccctcaactccacctaccccatctccctcaactccacctaccccatctccctcatgctgccacccccgactgtcactgcaccgaccggccctcgaggacctgctcttaggttcagaagcgaacctcacgtgcacactgaccggcctgagagatgcctcaggtgtcaccttcacctggacgccctcaagtgggaagagcgctgttcaaggaccacctgagcgtgacctctgtggctgctacagcgtgtccagtgtcctgccgggctgtgccgagccatggaaccatgggaagaccttcacttgcactgctgcctaccccgagtccaagaccccgctaaccgccaccctctcaaaatccggaaacacattccggcccgaggtccacctgctgccgccgccgtcggaggagctggccctgaacgagctggtgacgctgacgtgcctggcacgcggcttcagccccaaggatgtgctggttcgctggctgcaggggtcacaggagctgccccgcgagaagtacctgacttgggcatcccggcaggagcccagccagggcaccaccaccttcgctgtgaccagcatactgcgcgtggcagccgaggactggaagaagggggacaccttctcctgcatggtgggccacgaggccctgccgctggccttcacacagaagaccatcgaccgcttggcgggtaaacccacccatgtcaatgtgtctgttgtcatggcggaggtggacggcacctgctactga

SEQ ID NO: 135 - DNA, 1485 bp, Homo sapiens
atggactggacctggagggtcttctgcttgctggctgtagctccaggtgtccactcacaggtgcagctggtgcagtctgggcctgaggtgaagaagcctggggcctcagtgaaggtctcctgcaaggcttctggatacaccttcaccggctactatatgcactgggtgcgacaggcccctggacaagggcttgagtggatgggatggatcaaccctaacagtggtggcacaaactatgcacagaagtttcagggcagggtcaccatgaccagggacacgtccatcagcacagcctacatggagctgagcaggctgagatctgacgacacggccgtgtattactgtgcgagagacacagtgtgcctcccacaatgtgactactttgactactggggccagggaaccctggtcaccgtctcctcagcatccccgaccagccccaaggtcttcccgctgagcctctgcagcacccagccagatgggaacgtggtcatcgcctgcctggtccagggcttcttcccccaggagccactcagtgtgacctggagcgaaagcggacagggcgtgaccgccagaaacttcccacccagccaggatgcctccggggacctgtacaccacgagcagccagctgaccctgccggccacacagtgcctagccggcaagtccgtgacatgccacgtgaagcactacacgaatcccagccaggatgtgactgtgccctgcccagttccctcaactccacctaccccatctccctcaactccacctaccccatctccctcatgctgccacccccgactgtcactgcaccgaccggccctcgaggacctgctcttaggttcagaagcgaacctcacgtgcacactgaccggcctgagagatgcctcaggtgtcaccttcacctggacgccctcaagtgggaagagcgctgttcaaggaccacctgagcgtgacctctgtggctgctacagcgtgtccagtgtcctgccgggctgtgccgagccatggaaccatgggaagaccttcacttgcactgctgcctaccccgagtccaagaccccgctaaccgccaccctctcaaaatccggaaacacattccggcccgaggtccacctgctgccgccgccgtcggaggagctggccctgaacgagctggtgacgctgacgtgcctggcacgcggcttcagccccaaggatgtgctggttcgctggctgcaggggtcacaggagctgccccgcgagaagtacctgacttgggcatcccggcaggagcccagccagggcaccaccaccttcgctgtgaccagcatactgcgcgtggcagccgaggactggaagaagggggacaccttctcctgcatggtgggccacgaggccctgccgctggccttcacacagaagaccatcgaccgcttggcgggtaaacccacccatgtcaatgtgtctgttgtcatggcggaggtggacggcacctgctactga

SEQ ID NO: 136 - DNA, 1554 bp, Homo sapiens
atggaattggggctgagctgggttttccttgttgctattttagaaggtgtccagtgtgaggtgcagctggtggagtctgggggaggcttggtccagcctggggggtccctgagactctcctgtgcagcctctggattcacctttagtagctattggatgagctgggtccgccaggctccagggaaggggctggagtgggtggccaacataaagcaagatggaagtgagaaatactatgtggactctgtgaagggccgattcaccatctccagagacaacgccaagaactcactgtatctgcaaatgaacagcctgagagccgaggacacggctgtgtattactgtgcgagagacacagagggcagaggctactggtacttcgatctctggggccgtggcaccctggtcactgtctcctcagcttccaccaagggcccatcggtcttccccctggcgccctgctccaggagcacctctgggggcacagcggccctgggctgcctggtcaaggactacttcccagaaccggtgacggtgtcgtggaactcaggcgccctgaccagcggcgtgcacaccttcccggctgtcctacagtcctcaggactctactccctcagcagcgtggtgaccgtgccctccagcagcttgggcacccagacctacacctgcaacgtgaatcacaagcccagcaacaccaaggtggacaagagagttgagctcaaaaccccacttggtgacacaactcacacatgcccacggtgcccagagcccaaatcttgtgacacacctcccccgtgcccacggtgcccagagcccaaatcttgtgacacacctcccccatgcccacggtgcccagagcccaaatcttgtgacacacctcccccgtgcccaaggtgcccagcacctgaactcctgggaggaccgtcagtcttcctcttccccccaaaacccaaggatacccttatgatttcccggacccctgaggtcacgtgcgtggtggtggacgtgagccacgaagaccccgaggtccagttcaagtggtacgtggacggcgtggaggtgcataatgccaagacaaagccgcgggaggagcagtacaacagcacgttccgtgtggtcagcgtcctcaccgtcctgcaccaggactggctgaacggcaaggagtacaagtgcaaggtctccaacaaagccctcccagcccccatcgagaaaaccatctccaaaaccaaaggacagccccgagaaccacaggtgtacaccctgcccccatcccgggaggagatgaccaagaaccaggtcagcctgacctgcctggtcaaaggcttctaccccagcgacatcgccgtggagtgggagagcagcgggcagccggagaacaactacaacaccacgcctcccatgctggactccgacggctccttcttcctctacagcaagctcaccgtggacaagagcaggtggcagcaggggaacatcttctcatgctccgtgatgcatgaggctctgcacaaccgcttcacgcagaagagcctctccctgtctccgggtaaatga

SEQ ID NO: 137 - DNA, 1557 bp, Homo sapiens
atggacacactttgctccacgctcctgctgctgaccatcccttcatgggtcttgtcccagatcaccttgaaggagtctggtcctacgctggtgaaacccacacagaccctcacgctgacctgcaccttctctgggttctcactcagcactagtggagtgggtgtgggctggatccgtcagcccccaggaaaggccctggagtggcttgcactcatttattggaatgatgataagcgctacagcccatctctgaagagcaggctcaccatcaccaaggacacctccaaaaaccaggtggtccttacaatgaccaacatggaccctgtggacacagccacatattactgtgcacacagaccacaaagacacagcgacaactggttcgacccctggggccagggaaccctggtcaccgtctcctcagcttccaccaagggcccatcggtcttccccctggcgccctgctccaggagcacctctgggggcacagcggccctgggctgcctggtcaaggactacttcccagaaccggtgacggtgtcgtggaactcaggcgccctgaccagcggcgtgcacaccttcccggctgtcctacagtcctcaggactctactccctcagcagcgtggtgaccgtgccctccagcagcttgggcacccagacctacacctgcaacgtgaatcacaagcccagcaacaccaaggtggacaagagagttgagctcaaaaccccacttggtgacacaactcacacatgcccacggtgcccagagcccaaatcttgtgacacacctcccccgtgcccacggtgcccagagcccaaatcttgtgacacacctcccccatgcccacggtgcccagagcccaaatcttgtgacacacctcccccgtgcccaaggtgcccagcacctgaactcctgggaggaccgtcagtcttcctcttccccccaaaacccaaggatacccttatgatttcccggacccctgaggtcacgtgcgtggtggtggacgtgagccacgaagaccccgaggtccagttcaagtggtacgtggacggcgtggaggtgcataatgccaagacaaagccgcgggaggagcagtacaacagcacgttccgtgtggtcagcgtcctcaccgtcctgcaccaggactggctgaacggcaaggagtacaagtgcaaggtctccaacaaagccctcccagcccccatcgagaaaaccatctccaaaaccaaaggacagccccgagaaccacaggtgtacaccctgcccccatcccgggaggagatgaccaagaaccaggtcagcctgacctgcctggtcaaaggcttctaccccagcgacatcgccgtggagtgggagagcagcgggcagccggagaacaactacaacaccacgcctcccatgctggactccgacggctccttcttcctctacagcaagctcaccgtggacaagagcaggtggcagcaggggaacatcttctcatgctccgtgatgcatgaggctctgcacaaccgcttcacgcagaagagcctctccctgtctccgggtaaatga

SEQ ID NO: 138 - DNA, 408 bp, Homo sapiens; identical to SEQ ID NO: 128

SEQ ID NO: 139 - DNA, 3453 bp, Homo sapiens
atggcggtgccggctcggacctgcggcgcctctcggcccggcccagcgcggactgcgcgcccctggcccggctgcggcccccaccctggccccggcacccggcgcccgacgtccgggcccccgcgcccgctgtggctgctgctgccgcttctaccgctgctcgccgcccccggcgcctctgcctacagcttcccccagcagcacacgatgcagcactgggcccggcgtctggagcaggaggtcgacggcgtgatgcggatttttggaggcgtccagcagctccgtgagatttacaaggacaaccggaacctgttcgaggtacaggagaatgagcctcagaagttggtggagaaggtggcaggggacattgagagccttctggacaggaaggtgcaggccctgaagagactggctgatgctgcagagaacttccagaaagcacaccgctggcaggacaacatcaaggaggaagacatcgtgtactatgacgccaaggctgacgctgagctggacgaccctgagagtgaggatgtggaaagggggtctaaggccagcaccctaaggctggacttcatcgaggacccaaacttcaagaacaaggtcaactattcatacgcggctgtacagatccctacggacatctacaaaggctccactgtcatcctcaatgagctcaactggacagaggccctggagaatgtgttcatggaaaaccgcagacaagaccccacactgctgtggcaggtcttcggcagcgccacaggagtcactcgctactacccggccaccccgtggcgagcccccaagaagatcgacctgtacgatgtccgaaggagaccctggtatatccagggggcctcgtcacccaaagacatggtcatcatcgtggatgtgagtggcagtgtgagcggcctgaccctgaagctgatgaagacatctgtctgcgagatgctggacacgctgtctgatgatgactatgtgaatgtggcctcgttcaacgagaaggcacagcctgtgtcatgcttcacacacctggtgcaggccaatgtgcgcaacaagaaggtgttcaaggaagctgtgcagggcatggtggccaagggcaccacaggctacaaggccggctttgagtatgcctttgaccagctgcagaactccaacatcactcgggccaactgcaacaagatgatcatgatgttcacggatggtggtgaggaccgcgtgcaggacgtctttgagaagtacaattggccaaaccggacggtgcgcgtgtttactttctccgtggggcagcataactatgacgtcacaccgctgcagtggatggcctgtgccaacaaaggctactattttgagatcccttccatcggagccatccgcatcaacacacaggaatatctagatgtgttgggcaggcccatggtgctggcaggcaaggaggccaagcaggtgcagtggaccaacgtgtatgaggatgcactgggactggggttggtggtaacagggaccctccctgttttcaacctgacacaggatggccctggggaaaagaagaaccagctgatcctgggcgtgatgggcattgacgtggctctgaatgacatcaagaggctgacccccaactacacgcttggagccaacggctatgtgtttgccattgacctgaacggctacgtgttgctgcaccccaatctcaagccccagaccaccaacttccgggagcctgtgactctggacttcctggatgcggagctagaggatgagaacaaggaagagatccgtcggagcatgattgatggcaacaagggccacaagcagatcagaacgttggtcaagtccctggatgagaggtacatagatgaggtgacacggaactacacctgggtgcctataaggagcactaactacagcctggggctggtgctcccaccctacagcaccttctacctccaagccaatctcagtgaccagatcctgcaggtcaagtgtaagctggggcacctcgaaaattttgagttcctgctccccagcagctttgagtctgaaggacacgttttcattgctcccagagagtactgcaaggacctgaatgcctcagacaacaacaccgagttcctgaaaaactttattgagctcatggagaaagtgactccagactccaagcagtgcaacaacttccttctgcacaacctgatcttggacacgggcatcacgcagcagctggtagagcgtgtgtggagggaccaggatctcaacacgtacagcctactggccgtgttcgctgccacagacggtggcatcacccgagtcttccccaacaaggcagctgaggactggacagagaaccctgagcccttcaatgccagcttctaccgccgcagcctggataaccacggttatgtcttcaagcccccacaccaggatgccctgttaaggccgctggagctggagaatgacactgtgggcatcctcgtcagcacagctgtggagctcagcctaggcaggcgcacactgaggccagcagtggtgggcgtcaagctggacctagaggcttgggctgagaagttcaaggtgctagccagcaaccgtacccaccaagaccagcctcagaagtgcggccccaacagccactgtgagatggactgcgaggttaacaatgaggacttactctgtgtcctcattgatgatggaggattcctggtgctgtcaaaccagaaccatcagtgggaccaggtgggcaggttcttcagtgaggtggatgccaacctgatgctggcactctacaataactccttctacacccgcaaggagtcctatgactatcaggcagcctgtgcccctcagccccctggcaacctgggtgctgcaccccggggtgtctttgtgcccaccgttgcagatttccttaacctggcctggtggacctctgctgccgcctggtccctgttccagcagcttctctacggcctcatctaccacagctggttccaagcagaccccgcggaggccgaggggagccccgagacgcgcgagagcagctgcgtcatgaaacagacccagtactacttcggctcggtaaacgcctcctacaacgccatcatcgactgcggaaactgctccaggctgttccacgcgcagagactgaccaacaccaatcttctctttgtggtggccgagaagccgctgtgcagccagtgcgaggctggccggctgctgcagaaggagacgcactcggacggcccggagcagtgtgagctagtgcagagaccgcgataccggagaggcccgcacatctgcttcgactacaacgcgacagaagatacctcagactgtggccgcggggcctccttcccgccgtcgctgggcgtcctggtctccctgcaactgctgctcctcctgggcctgccgccccggccgcagcctcaagtcctcgtccacgcctctcgccgcctctga

SEQ ID NO: 140 - DNA, 636 bp, Homo sapiens
atgacccagtctccatcctccctgtctgcatctgtaggagacagagtcaccatcacttgccgggcgagtcagggcattagcaattatttagcctggtatcagcagaaaccagggaaagcccctaagctcctgatctatgctgcatccagtttgcaaagtggggtcccatcaaggttcagcggcagtggatctgggacagatttcactctcaccatcagcagcctgcagcctgaagattttgcaacttactattgtcaacaggctaacagtttccctctcactttcggcggagggaccaaggtggagatcaaacgaactgtggctgcaccatctgtcttcatcttcccgccatctgatgagcagttgaaatctggaactgcctctgttgtgtgcctgctgaataacttctatcccagagaggccaaagtacagtggaaggtggataacgccctccaatcgggtaactcccaggagagtgtcacagagcaggacagcaaggacagcacctacagcctcagcagcaccctgacgctgagcaaagcagactacgagaaacacaaagtctacgcctgcgaagtcacccatcagggcctgagctcgcccgtcacaaagagcttcaacaggggagagtgttag

SEQ ID NO: 141 - DNA, 717 bp, Homo sapiens
atggacatgagggtccccgctcagctcctggggctcctgctgctctggctcccaggtgccaaatgtgacatccagatgacccagtctccttccaccctgtctgcatctgtaggagacagagtcaccatcacttgccgggccagtcagagtattagtagctggttggcctggtatcagcagaaaccagggaaagcccctaagctcctgatctataaggcgtctagtttagaaagtggggtcccatcaaggttcagcggcagtggatctgggacagaattcactctcaccatcagcagcctgcagcctgatgattttgcaacttattactgccaacagtataataagctctcactgtggtggacgttcggccaagggaccaaggtggaaatcaaacgaactgtggctgcaccatctgtcttcatcttcccgccatctgatgagcagttgaaatctggaactgcctctgttgtgtgcctgctgaataacttctatcccagagaggccaaagtacagtggaaggtggataacgccctccaatcgggtaactcccaggagagtgtcacagagcaggacagcaaggacagcacctacagcctcagcagcaccctgacgctgagcaaagcagactacgagaaacacaaagtctacgcctgcgaagtcacccatcagggcctgagctcgcccgtcacaaagagcttcaacaggggagagtgttag

SEQ ID NO: 142 - DNA, 543 bp, Homo sapiens
atggtgttgcagacccaggtcttcatttctctgttgctctggatctctggtgcctacggggacatcgtgatgacccagtctccagactccctggctgtgtctctgggcgagagggccaccatcaactgcaagtccagccagagtgttttatacagctccaacaataagaactacttagcttggtaccagcagaaaccaggacagcctcctaagctgctcatttactgggcatctacccgggaatccggggtccctgaccgattcagtggcagcgggtctgggacagatttcactctcaccatcagcagcctgcaggctgaagatgtggcagtttattactgtcagcaatattatagtactcctcccacagtgcttcagcctcgaacacaaacctcctccccatacgctgggccagtaggtctttgctgcagcagctgcttcctctgcacacagcccccaacatgcatgcttcctctgtgtgttggggaggtcactctcttgatttattcgttggagggtttgcagggcccaggattaaattaa

SEQ ID NO: 143 - DNA, 2739 bp, Homo sapiens
atgcctgggaagagaggcttgggctggtggtgggcccggctgcccctttgcctgctcctcagcctttacggcccctggatgccttcctccctgggaaagcccaaaggccaccctcacatgaattccatccgcatagatggggacatcacactgggaggcctgttcccggtgcatggccggggctcagagggcaagccctgtggagaacttaagaaggaaaagggcatccaccggctggaggccatgctgttcgccctggatcgcatcaacaacgacccggacctgctgcctaacatcacgctgggcgcccgcattctggacacctgctccagggacacccatgccctcgagcagtcgctgacctttgtgcaggcgctcatcgagaaggatggcacagaggtccgctgtggcagtggcggcccacccatcatcaccaagcctgaacgtgtggtgggtgtcatcggtgcttcagggagctcggtctccatcatggtggccaacatccttcgcctcttcaagataccccagatcagctacgcctccacagcgccagacctgagtgacaacagccgctacgacttcttctcccgcgtggtgccctcggacacgtaccaggcccaggccatggtggacatcgtccgtgccctcaagtggaactatgtgtccacagtggcctcggagggcagctatggtgagagcggtgtggaggccttcatccagaagtcccgtgaggacgggggcgtgtgcatcgcccagtcggtgaagataccacgggagcccaaggcaggcgagttcgacaagatcatccgccgcctcctggagacttcgaacgccagggcagtcatcatctttgccaacgaggatgacatcaggcgtgtgctggaggcagcacgaagggccaaccagacaggccatttcttctggatgggctctgacagctggggctccaagattgcacctgtgctgcacctggaggaggtggctgagggtgctgtcacgatcctccccaagaggatgtccgtacgaggcttcgaccgctacttctccagccgcacgctggacaacaaccggcgcaacatctggtttgccgagttctgggaggacaacttccactgcaagctgagccgccacgccctcaagaagggcagccacgtcaagaagtgcaccaaccgtgagcgaattgggcaggattcagcttatgagcaggaggggaaggtgcagtttgtgatcgatgccgtgtacgccatgggccacgcgctgcacgccatgcaccgtgacctgtgtcccggccgcgtggggctctgcccgcgcatggaccctgtagatggcacccagctgcttaagtacatccgaaacgtcaacttctcaggcatcgcagggaaccctgtgaccttcaatgagaatggagatgcgcctgggcgctatgacatctaccaataccagctgcgcaacgattctgccgagtacaaggtcattggctcctggactgaccacctgcaccttagaatagagcggatgcactggccggggagcgggcagcagctgccccgctccatctgcagcctgccctgccaaccgggtgagcggaagaagacagtgaagggcatgccttgctgctggcactgcgagccttgcacagggtaccagtaccaggtggaccgctacacctgtaagacgtgtccctatgacatgcggcccacagagaaccgcacgggctgccggcccatccccatcatcaagcttgagtggggctcgccctgggccgtgctgcccctcttcctggccgtggtgggcatcgctgccacgttgttcgtggtgatcacctttgtgcgctacaacgacacgcccatcgtcaaggcctcgggccgtgaactgagctacgtgctgctggcaggcatcttcctgtgctatgccaccaccttcctcatgatcgctgagcccgaccttggcacctgctcgctgcgccgaatcttcctgggactagggatgagcatcagctatgcagccctgctcaccaagaccaaccgcatctaccgcatcttcgagcagggcaagcgctcggtcagtgccccacgcttcatcagccccgcctcacagctggccatcaccttcagcctcatctcgctgcagctgctgggcatctgtgtgtggtttgtggtggacccctcccactcggtggtggacttccaggaccagcggacactcgacccccgcttcgccaggggtgtgctcaagtgtgacatctcggacctgtcgctcatctgcctgctgggctacagcatgctgctcatggtcacgtgcaccgtgtatgccatcaagacacgcggcgtgcccgagaccttcaatgaggccaagcccattggcttcaccatgtacaccacttgcatcgtctggctggccttcatccccatcttctttggcacctcgcagtcggccgacaagctgtacatccagacgacgacgctgacggtctcggtgagtctgagcgcctcggtgtccctgggaatgctctacatgcccaaagtctacatcatcctcttccacccggagcagaacgtgcccaagcgcaagcgcagcctcaaagccgtcgttacggcggccaccatgtccaacaagttcacgcagaagggcaacttccggcccaacggagaggccaagtctgagctctgcgagaaccttgaggccccagcgctggccaccaaacagacttacgtcacttacaccaaccatgcaatctag

SEQ ID NO: 144 - DNA, 3735 bp, Homo sapiens
atgaataatcaaaaagtggtagctgtgctactgcaagagtgcaagcaagtgctggatcagctcttgttggaagcgccagatgtgtcggaagaggacaagagcgaggaccagcgctgcagagctttactccccagcgagttaaggaccctgatccaggaggcaaaggaaatgaagtggcccttcgtgcctgaaaagtggcagtacaaacaagccgtgggcccagaggacaaaacaaacctgaaggatgtgattggcgccgggttgcagcagttactggcgtccctgagggcctccatcctcgctcgggactgtgcggctgcggcggctattgtgttcttggtggaccggttcctgtatgggctcgacgtctctggaaaacttctgcaggtcgccaaaggtctccacaagttgcagccagccacgccaattgccccgcaggtggttattcgccaagcccgaatctccgtgaactcaggaaaacttttaaaagcagagtatattctgagcagtctaataagcaacaatggagcaacgggtacctggctgtacagaaatgaaagtgacaaggtcctggtgcagtcggtctgtatacagatcagagggcagattctgcaaaagctggggatgtggtacgaagcagcagagttaatatgggcctccattgtaggatatttggcacttcctcagccggataaaaagggcctctccacgtcgctaggtatactggcagacatctttgtttccatgagcaagaacgattatgaaaagtttaaaaacaatccacaaattaatttgagcctgctgaaggagtttgaccaccatttgctgtccgctgcagaagcctgcaagctggcagctgccttcagtgcctatacgccgctcttcgtgctcacagctgtgaatatccgtggcacgtgtttattgtcctacagtagttcaaatgactgtcctccagaattgaaaaacttacatctgtgtgaagccaaagaggcctttgagattggcctcctcaccaagagagatgatgagcctgttactggaaaacaggagcttcacagctttgtcaaagctgctttcggtctcaccacagtgcacagaaggctccatggggagacagggacggtccatgcagcaagtcagctctgtaaggaagcaatggggaagctgtacaatttcagcacttcctccagaagtcaggacagagaagctctgtctcaagaagttatgtctgtgattgcccaggtgaaggaacatttacaagttcaaagcttctcaaatgtagatgacagatcttatgttcccgagagtttcgagtgcaggttggataaacttatcttgcatgggcaaggggatttccaaaaaatccttgacacctattcacagcaccatacttcggtgtgtgaagtatttgaaagtgattgtggaaacaacaaaaatgaacagaaagatgcaaaaacaggagtctgcatcactgctctaaaaacagaaataaaaaacatagatactgtgagtactactcaagaaaagccacattgtcaaagagacacaggaatatcttcctccctaatgggtaagaatgttcagagggaactcagaaggggaggaaggagaaactggacccattctgatgcatttcgagtctccttggatcaagatgtggagactgagactgagccatcggactacagcaatggtgagggagctgttttcaacaagtctctgagtggcagccagacttccagtgcttggagcaacttatcagggtttagttcctctgcaagctgggaggaagtgaattatcacgttgacgacaggtcagccagaaaagagcctggcaaagaacatctggtggacactcagtgttccactgccttgtctgaggagctagagaatgacagggaaggcagagctatgcattcattgcattcacagcttcatgatctctctcttcaggaacccaacaatgacaatttggagccttctcaaaatcagccacagcaacagatgcccttgacacccttctcgcctcataataccccaggcattttcttggcccctggtgcagggcttctagaaggagctccagaaggtatccaggaagtcagaaatatgggacccagaaatacttctgctcactccagaccctcatatcgttctgcttcttggtcttctgattctggtaggcccaagaatatgggcacacatccttcagtccaaaaagaagaagcctttgaaataattgttgagtttccagaaaccaactgcgatgtcaaagacaggcaggggaaagagcagggagaagaaattagtgaaagaggcgcaggccctacatttaaagctagtccctcctgggttgacccagaaggagaaacagcagaaagcactgaagatgcacccttagactttcacagggtcctgcacaattctctgggaaacatttccatgctgccatgtagctccttcacccctaattggcctgttcaaaatcctgactccagaaaaagtggtggcccagtcgcagagcagggcatcgaccctgatgcctccacagtggatgaggaggggcaactgctcgacagcatggatgttccctgcacaaatgggcacggctctcatagactgtgcattctgagacagccgcctggtcagagggcggagacccccaattcctctgtaagcggtaacatcctcttccctgtcctcagcgaggactgcactaccacagaggaaggaaatcagcctggaaacatgctaaactgcagccagaactccagctcatcctcagtgtggtggctgaaatcacctgcattttccagtggttcttctgagggggacagcccttggtcctatctgaattccagtgggagttcttgggtttcattgccgggaaagatgaggaaagagatccttgaggctcgcaccttgcaacctgatgactttgaaaagctgttggcaggagtgaggcatgattggctgtttcagagactagagaatacgggggtttttaagcccagtcaactccaccgagcacatagtgctcttttgttaaaatattcaaaaaaatctgaactgtggacggcccaggaaactattgtctatttgggggactacttgactgtgaagaaaaaaggcagacaaagaaatgctttttgggttcatcatcttcatcaagaagaaattctggggaggtatgttgggaaagactataaggagcagaaggggctctggcaccacttcactgatgtggagcgacagatgaccgcacagcactatgtgacagaatttaacaagagactctatgaacaaaacattcccacccagatattctacatcccatccacaatactactgattttagaggacaagacaataaagggatgtatcagtgtggagccttacatactgggagaatttgtaaaattgtcaaataacacgaaagtggtgaaaacagaatacaaagccacagaatatggcttggcctatggccatttttcttatgagttttctaatcatagagatgttgtggtcgatttacaaggttgggtaaccggtaatggaaaaggactcatctacctcacagatccccagattcactccgttgatcagaaagttttcactaccaattttggaaagagaggaattttttacttctttaataaccagcatgtggaatgtaatgaaatctgccatcgtctttctttgactagaccttcaatggagaaaccatgcacatag

SEQ ID NO: 145 - DNA, 1500 bp, Homo sapiens
atggcttcgaccacaacctgcaccaggttcacggacgagtatcagcttttcgaggagcttggaaagggggcattctcagtggtgagaagatgtatgaaaattcctactggacaagaatatgctgccaaaattatcaacaccaaaaagctttctgctagggatcatcagaaactagaaagagaagctagaatctgccgtcttttgaagcaccctaatattgtgcgacttcatgatagcatatcagaagagggctttcactacttggtgtttgatttagttactggaggtgaactgtttgaagacatagtggcaagagaatactacagtgaagctgatgccagtcattgtatacagcagattctagaaagtgttaatcattgtcacctaaatggcatagttcacagggacctgaagcctgagaatttgcttttagctagcaaatccaagggagcagctgtgaaattggcagactttggcttagccatagaagttcaaggggaccagcaggcgtggtttggttttgctggcacacctggatatctttctccagaagttttacgtaaagatccttatggaaagccagtggatatgtgggcatgtggtgtcattctctatattctacttgtggggtatccacccttctgggatgaagaccaacacagactctatcagcagatcaaggctggagcttatgattttccatcaccagaatgggacacggtgactcctgaagccaaagacctcatcaataaaatgcttactatcaaccctgccaaacgcatcacagcctcagaggcactgaagcacccatggatctgtcaacgttctactgttgcttccatgatgcacagacaggagactgtagactgcttgaagaaatttaatgctagaagaaaactaaagggtgccatcttgacaactatgctggctacaaggaatttctcagcagccaagagtttgttgaagaaaccagatggagtaaaggagtcaactgagagttcaaatacaacaattgaggatgaagatgtgaaagcacgaaagcaagagattatcaaagtcactgaacaactgatcgaagctatcaacaatggggactttgaagcctacacaaaaatctgtgacccaggccttactgcttttgaacctgaagctttgggtaatttagtggaagggatggattttcaccgattctactttgaaaatgctttgtccaaaagcaataaaccaatccacactattattctaaaccctcatgtacatctggtaggggatgatgccgcctgcatagcatatattaggctcacacagtacatggatggcagtggaatgccaaagacaatgcagtcagaagagactcgtgtgtggcaccgccgggatggaaagtggcagaatgttcattttcatcgctcggggtcaccaacagtacccatcaagccaccctgtattccaaatgggaaagaaaacttctcaggaggcacctctttgtggcaaaacatctaa

SEQ ID NO: 146 - DNA, 714 bp, Homo sapiens
atggataatggagactggggctatatgatgactgacccagtcacattaaatgtaggtggacacttgtatacaacgtctctcaccacattgacgcgttacccggattccatgcttggagctatgtttgggggggacttccccacagctcgagaccctcaaggcaattactttattgatcgagatggacctcttttccgatatgtcctcaacttcttaagaacttcagaattgaccttaccgttggattttaaggaatttgatctgcttcggaaagaagcagatttttaccagattgagcccttgattcagtgtctcaatgatcctaagcctttgtatcccatggatacttttgaagaagttgtggagctgtctagtactcggaagctttctaagtactccaacccagtggctgtcatcataacgcaactaaccatcaccactaaggtccattccttactagaaggcatctcaaattattttaccaagtggaataagcacatgatggacaccagagactgccaggtttcctttacttttggaccctgtgattatcaccaggaagtttctcttagggtccacctgatggaatacattacaaaacaaggtttcacgatccgcaacacccgggtgcatcacatgagtgagcgggccaatgaaaacacagtggagcacaactggactttctgtaggctagcccggaagacagacgactga

SEQ ID NO: 147 - DNA, 714 bp, Homo sapiens; identical to SEQ ID NO: 146

SEQ ID NO: 148 - DNA, 1626 bp, Homo sapiens
atgcctggccgctgtcagagtgacgccgcgatgagagtaaacgggccagcatcccgtgcaccagcggggtggaccagcgggagtctgcacacaggcccccgagcaggacgccctcgtgcgcaggcgcggggtgtacgtgggcggggcctcctcctccggccccgcccagcgaaggagcttcctcttccgaggaaaggcggggcctgggcgcccgcgggaaacccgggcccgttgcatccgctgggtgtagccgtggggatggcaggttcggggaggctggtcctacggccctggattcgggagctgattctggggtcagagacaccctccagtccacgagccgggcagctgcttgaggacgccgaggccgcggtcgcgggcccatcccacgcccctgatacgtccgacgtcggggccacgctgcttgtgtctgacgggacccacagtgtccgatgcctggtgacgcgggaggccctggacacctcggactgggaggagaaggagttcggcttccgcgggacagagggccggctgctgctgctgcaggactgcggggttcatgtccaggtcgctgagggcggcgcgcccgcagagttctatctccaggtggaccgcttcagcctgctgcccacggagcagccccggctacgggtgcctggttgcaaccaagacttagatgttcagaaaaagctctatgactgccttgaggagcacctttcagagtccacctcgtccaatgcaggcctatcactgtcccagcttctggatgaaatgcgggaggaccaggagcatcagggggcactcgtgtgcctggctgaaagctgcctgacactggagggcccttgcacagcaccccctgtcacccactgggctgcctcacgatgcaaggccacgggagaagctgtgtacactgtccccagctcaatgctgtgcatctctgagaatgaccagctaattctgagctctctaggcccctgtcagaggacacagggccctgagctgcccccaccagacccggctctgcaggacctatctctgaccctcatagcctctcctccttcctcacccagttcctcaggaaccccggccttacccggccacatgtcatccgaggaaagtggtaccagcatcagccttctgcctgccctgtccttggctgctccagacccagggcagagaagcagctcccagccctcaccagccatctgctcagcccctgccaccctgacccccaggtccccacacgccagccgtacccccagctccccactccagagctgcactcccagtctctcaccccgtagccatgtccccagtccacaccaggctcttgtgaccaggccccagaaacctagcctggagttcaaggagtttgtagggttgccctgcaagaatcggccgccttttcccaggaccggagctaccaggggagcccaggagccctgctctgtctgggaacccccaaagaggcatcgtgatggttctgccttccagtatgagtatgagccaccctgcacgtccctctgtgctcgggtccaagctgtcaggcttcctccccagctcatggcctgggccttgcactttctgatggatgcacagccagggtctgagccaactccgatgtga

SEQ ID NO: 149 - DNA, 2496 bp, Homo sapiens
atgggggagcttttccggagtgaagaaatgacactggcccagctttttctacagtcagaggctgcttattgttgtgtcagtgaattaggagaacttggaaaggttcagtttcgtgacttaaatccagatgtgaatgttttccaacggaaatttgtgaatgaagttagaagatgtgaagaaatggatcgaaagcttcgatttgttgagaaagagataagaaaagctaacattccgattatggacaccggtgaaaacccagaggttcccttcccccgggacatgattgacttagaggccaattttgagaagattgaaaatgaactgaaggaaatcaacacaaaccaggaagctctgaagagaaacttcctggaactgaccgaattaaaatttatacttcgcaaaactcagcaattttttgatgagatggcggatccagacttgttggaagagtcctcatccctcttggagccaagtgagatgggaagaggcactcctttaagacttggcttcgtggctggtgtcattaaccgggagcgcatccctacttttgagcgcatgctttggcgggtatgccggggaaatgtgttcctgcgacaggctgaaatcgagaaccccctggaggatcctgtgactggcgactacgtgcacaagtctgtgtttatcattttcttccaaggcgatcagctgaaaaacagagtcaagaaaatctgtgaagggttccgagcctcactctatccctgtcctgagacaccacaggagaggaaggaaatggcttctggagtgaataccaggattgatgatctccaaatggttctgaatcaaacggaggatcaccgccagagggttctgcaggcagctgctaagaacatccgtgtctggttcatcaaagtgcggaagatgaaggccatctatcacaccctgaacctgtgcaacatagatgtgactcagaaatgcttgattgcagaggtctggtgccctgtcaccgaccttgactccatccagtttgcactcagaaggggcacggaacacagtggttccactgtaccttccattttgaacaggatgcagacaaaccagactcccccaacctataacaaaaccaacaagtttacctatggctttcagaacatagtagatgcttatggaattggaacttaccgagagataaatccagctccgtatactattatcacgttcccttttctatttgctgtgatgtttggagacttcggtcatggcattttaatgaccctttttgctgtgtggatggtactgagggagagccggatcctttcccagaagaatgagaatgagatgtttagcactgtgttcagtggtcgatacattattttattgatgggtgtgttctccatgtacactggcctcatctacaatgattgcttttccaagtctcttaatatctttgggtcatcctggagtgtacggccgatgtttacttataattggactgaagagacgcttcgggggaaccctgttctacagctgaacccagccctccctggagtgtttggtggaccatacccttttggcattgatccaatttggaacattgctaccaataaactgacgttcttgaactcctttaagatgaagatgtctgttatccttggtatcatccatatgctgtttggagtcagcctgagtctgttcaaccatatctatttcaagaagcccctgaatatctactttggatttattcctgaaataatcttcatgacctctttgtttggctatttggttatccttattttttacaagtggacggcctatgatgctcatacctctgagaatgcaccaagccttctgatccatttcataaacatgttcctcttttcctacccagagtctggttattcaatgttgtattctggacagaaaggaattcagtgtttcctggtagtggttgcactactgtgtgtaccttggatgctgctgtttaaaccattggtccttcgccgtcagtatttgaggagaaagcatttgggaactctcaactttggtgggatcagggtgggcaacggaccgacagaggaggatgctgagattattcagcatgaccagctctccacccactcagaggacgcagacgagtttgactttggggacaccatggtccaccaggccatccacaccatcgagtactgcctgggctgcatctccaacactgcctcctacttgcggctctgggccctcagcctcgctcatgcgcagctgtctgaggtgctttggaccatggtgatccacatcggcctgagcgtgaagagcttggcgggaggtttggtgctgttcttcttcttcactgcctttgccaccctgaccgtggccatcctcctgatcatggagggcctctcggcctttctccacgcactgcgcttacactgggttgagttccagaataaattctacagcgggaccggtttcaagttcttacccttctccttcgagcatattcgggaagggaagtttgaagagtga

SEQ ID NO: 150 - DNA, 2652 bp, Homo sapiens
atgcaaaagattatgcatatttctgtcctcctttctcctgttttatggggactgatttttggtgtctcttctaacagcatacagataggggggctatttcctaggggcgccgatcaagaatacagtgcatttcgagtagggatggttcagttttccacttcggagttcagactgacaccccacatcgacaatttggaggtggcaaacagcttcgcagtcactaatgctttctgctcccagttttcgagaggagtctatgctatttttggattttatgacaagaagtctgtaaataccatcacatcattttgcggaacactccacgtctccttcatcactcccagcttcccaacagatggcacacatccatttgtcattcagatgagacccgacctcaaaggagctctccttagcttgattgaatactatcaatgggacaagtttgcatacctctatgacagtgacagaggcttatcaacactgcaagctgtgctggattctgctgctgaaaagaaatggcaagtgactgctatcaatgtgggaaacattaacaatgacaagaaagatgagatgtaccgatcactttttcaagatctggagttaaaaaaggaacggcgtgtaattctggactgtgaaagggataaagtaaacgacattgtagaccaggttattaccattggaaaacatgttaaagggtaccactacatcattgcaaatctgggatttactgatggagacctattaaaaatccagtttggaggtgcaaatgtctctggatttcagatagtggactatgatgattcgttggtatctaaatttatagaaagatggtcaacactggaagaaaaagaataccctggagctcacacaacaacaattaagtatacttctgctctgacctatgatgccgttcaagtgatgactgaagccttccgcaacctaaggaagcaaagaattgaaatctcccgaagggggaatgcaggagactgtctggcaaacccagcagtgccctggggacaaggtgtagaaatagaaagggccctcaaacaggttcaggttgaaggtctctcaggaaatataaagtttgaccagaatggaaaaagaataaactatacaattaacatcatggagctcaaaactaatgggccccggaagattggctactggagtgaagtggacaaaatggttgttacccttactgagctcccttctggaaatgacacctctgggcttgagaataagactgttgttgtcaccacaattttggaatctccgtatgttatgatgaagaaaaatcatgaaatgcttgaaggcaatgagcgctatgagggctactgtgttgacctggctgcagaaatcgccaaacattgtgggttcaagtacaagttgacaattgttggtgatggcaagtatggggccagggatgcagacacgaaaatttggaatgggatggttggagaacttgtatatgggaaagctgatattgcaattgctccattaactattacccttgtgagagaagaggtgattgacttctcaaagcccttcatgagcctcgggatatctatcatgatcaagaagcctcagaagtccaaaccaggagtgttttcctttcttgatcctttagcctatgagatctggatgtgcattgtttttgcctacattggggtcagtgtagttttattcctggtcagcagatttagcccctacgagtggcacactgaggagtttgaagatggaagagaaacacaaagtagtgaatcaactaatgaatttgggatttttaatagtctctggttttccttgggtgcctttatgcagcaaggatgcgatatttcgccaagatccctctctgggcgcattgttggaggtgtgtggtggttctttaccctgatcataatctcctcctacacggctaacttagctgccttcctgactgtagagaggatggtgtctcccatcgaaagtgctgaggatctttctaagcaaacagaaattgcttatggaacattagactctggctccactaaagagtttttcaggagatctaaaattgcagtgtttgataaaatgtggacctacatgcggagtgcggagccctctgtgtttgtgaggactacggccgaaggggtggctagagtgcggaagtccaaagggaaatatgcctacttgttggagtccacgatgaacgagtacattgagcaaaggaagccttgcgacaccatgaaagttggtggaaacctggattccaaaggctatggcatcgcaacacctaaaggatcctcattaagaaatgcggttaacctcgcagtactaaaactgaatgaacaaggcctgttggacaaattgaaaaacaaatggtggtacgacaaaggagagtgcggcagcgggggaggtgattccaaggaaaagaccagtgccctcagtctgagcaacgttgctggagtattctacatccttgtcgggggccttggtttggcaatgctggtggctttgattgagttctgttacaagtcaagggccgaggcgaaacgaatgaaggtggcaaagaatgcacagaatattaacccatcttcctcgcagaattcacagaattttgcaacttataaggaaggttacaacgtatatggcatcgaaagtgttaaaatttag

SEQ ID NO: 151 - DNA, 972 bp, Homo sapiens
atgtggcccctggtagcggcgctgttgctgggctcggcgtgctgcggatcagctcagctactatttaataaaacaaaatctgtagaattcacgttttgtaatgacactgtcgtcattccatgctttgttactaatatggaggcacaaaacactactgaagtatacgtaaagtggaaatttaaaggaagagatatttacacctttgatggagctctaaacaagtccactgtccccactgactttagtagtgcaaaaattgaagtctcacaattactaaaaggagatgcctctttgaagatggataagagtgatgctgtctcacacacaggaaactacacttgtgaagtaacagaattaaccagagaaggtgaaacgatcatcgagctaaaatatcgtgttgtttcatggttttctccaaatgaaaatattcttattgttattttcccaatttttgctatactcctgttctggggacagtttggtattaaaacacttaaatatagatccggtggtatggatgagaaaacaattgctttacttgttgctggactagtgatcactgtcattgtcattgttggagccattcttttcgtcccaggtgaatattcattaaagaatgctactggccttggtttaattgtgacttctacagggatattaatattacttcactactatgtgtttagtacagcgattggattaacctccttcgtcattgccatattggttattcaggtgatagcctatatcctcgctgtggttggactgagtctctgtattgcggcgtgtataccaatgcatggccctcttctgatttcaggtttgagtatcttagctctagcacaattacttggactagtttatatgaaatttgtggcttccaatcagaagactatacaacctcctaggaaagctgtagaggaaccccttaatgcattcaaagaatcaaaaggaatgatgaatgatgaataa

SEQ ID NO: 152 - DNA, 1917 bp, Homo sapiens
atgggcaagatcgagaacaacgagagggtgatcctcaatgtcgggggcacccggcacgaaacctaccgcagcaccctcaagaccctgcctggaacacgcctggcccttcttgcctcctccgagcccccaggcgactgcttgaccacggcgggcgacaagctgcagccgtcgccgcctccactgtcgccgccgccgagagcgcccccgctgtcccccgggccaggcggctgcttcgagggcggcgcgggcaactgcagttcccgcggcggcagggccagcgaccatcccggtggcggccgcgagttcttcttcgaccggcacccgggcgtcttcgcctatgtgctcaattactaccgcaccggcaagctgcactgccccgcagacgtgtgcgggccgctcttcgaggaggagctggccttctggggcatcgacgagaccgacgtggagccctgctgctggatgacctaccggcagcaccgcgacgccgaggaggcgctggacatcttcgagacccccgacctcattggcggcgaccccggcgacgacgaggacctggcggccaagaggctgggcatcgaggacgcggcggggctcgggggccccgacggcaaatctggccgctggaggaggctgcagccccgcatgtgggccctcttcgaagacccctactcgtccagagccgccaggtttattgcttttgcttctttattcttcatcctggtttcaattacaactttttgcctggaaacacatgaagctttcaatattgttaaaaacaagacagaaccagtcatcaatggcacaagtgttgttctacagtatgaaattgaaacggatcctgccttgacgtatgtagaaggagtgtgtgtggtgtggtttacttttgaatttttagtccgtattgttttttcacccaataaacttgaattcatcaaaaatctcttgaatatcattgactttgtggccatcctacctttctacttagaggtgggactcagtgggctgtcatccaaagctgctaaagatgtgcttggcttcctcagggtggtaaggtttgtgaggatcctgagaattttcaagctcacccgccattttgtaggtctgagggtgcttggacatactcttcgagctagtactaatgaatttttgctgctgataattttcctggctctaggagttttgatatttgctaccatgatctactatgccgagagagtgggagctcaacctaacgacccttcagctagtgagcacacacagttcaaaaacattcccattgggttctggtgggctgtagtgaccatgactaccctgggttatggggatatgtacccccaaacatggtcaggcatgctggtgggagccctgtgtgctctggctggagtgctgacaatagccatgccagtgcctgtcattgtcaataattttggaatgtactactccttggcaatggcaaagcagaaacttccaaggaaaagaaagaagcacatccctcctgctcctcaggcaagctcacctactttttgcaagacagaattaaatatggcctgcaatagtacacagagtgacacatgtctgggcaaagacaatcgacttctggaacataacagatcagtgttatcaggtgacgacagtacaggaagtgagccgccactatcacccccagaaaggctccccatcagacgctctagtaccagagacaaaaacagaagaggggaaacatgtttcctactgacgacaggtgattacacgtgtgcttctgatggagggatcaggaaaggatatgaaaaatcccgaagcttaaacaacatagcgggcttggcaggcaatgctctgaggctctctccagtaacatcaccctacaactctccttgtcctctgaggcgctctcgatctcccatcccatctatcttgtaa

SEQ ID NO: 153 - DNA, 1953 bp, Homo sapiens
atggggcccgccagccccgctgctcgcggtctaagtcgccgcccgggccagccgccgctgccgctgctgctgccactattgctgctgcttctgcgcgcgcagcccgccatcgggagcctggccggtgggagccccggcgcggccgaggccccggggtcggcccaggtggctggactatgcgggcgcctaacccttcaccgggacctgcgcaccggccgctgggaaccagacccacagcgctctcgacgctgtctccgggacccgcagcgcgtgctggagtactgcagacagatgtacccggagctgcagattgcacgtgtggagcaggctacgcaggccatccccatggagcgctggtgcgggggttcccggagcggcagctgcgcccacccccaccaccaggttgtgcccttccgctgcctgcctggtgaatttgtgagtgaggccctgctggtgcctgaaggctgccggttcttgcaccaggagcgcatggaccaatgtgagagttcaacccggaggcatcaggaggcacaggaggcctgcagctcccagggcctcatcctgcacggctcgggcatgctcttaccctgtggctcggatcggttccgtggtgtggagtatgtgtgctgtccccctccagggacccccgacccatctgggacagcagttggtgacccctccacccggtcctggcccccggggagcagagtagagggggctgaggacgaggaagaggaggaatccttcccacagccagtagatgattacttcgtggagcctccgcaggctgaagaggaagaggaaacggtcccacccccaagctcccatacacttgcagtggtcggcaaagtcactcccaccccgaggcccacagacggtgtggatatttactttggcatgcctggggaaatcagtgagcacgaggggttcctgagggccaagatggacctggaggagcgtaggatgcgccagattaatgaggtgatgcgtgaatgggccatggcagacaaccagtccaagaacctgcctaaagccgacagacaggccctgaatgagcacttccagtccattctgcagactctggaggagcaggtgtctggtgagcgacagcgcctggtggaaacccacgccacccgcgtcatcgcccttatcaacgaccagcgccgggctgccttggagggcttcctggcagccctgcaggcagatccgcctcaggcggagcgtgtcctgttggccctgcggcgctacctgcgtgcggagcagaaggaacagaggcacacgctgcgccactaccagcatgtggccgccgtggatcccgagaaggcacagcagatgcgcttccaggtgcatacccaccttcaagtgattgaggagagggtgaatcagagcctgggcctgcttgaccagaacccccacctggctcaggagctgcggccccaaatccaggaactcctccactctgaacacctgggtcccagtgaattggaagcccctgcccctgggggcagcagcgaggacaagggtgggctgcagcctccagattccaaggatgacacccccatgacccttccaaaagggtccacagaacaagatgctgcatcccctgagaaagagaagatgaacccgctggaacagtatgagcgaaaggtgaatgcgtctgttccaaggggtttccctttccactcatcggagattcagagggatgagctggcaccagctgggacaggggtgtcccgtgaggctgtgtcgggtctgctgatcatgggagcgggcggaggctccctcatcgtcctctccatgctgctcctgcgcaggaagaagccctacggggctatcagccatggcgtggtggaggtggaccccatgctgaccctggaggagcagcagctccgcgaactgcagcggcacggctatgagaaccccacttaccgcttcctggaggaacgaccctga

SEQ ID NO: 154 - DNA, 333 bp, Homo sapiens
atggctgcccctcccaaagctcccatccgtgtcaggaatttgaccatcagagcaggagccctcactgggaaggagaacaacatgctgcagcccgagacccacatcttcacagcccccgaggaggggagctcccaaggggctctgctgcttggccaggccccagaacctttgtctctgccctgtactccagtgaccttggagcagcaactggtttctccttctggggatccccacagggcccctgccctgcccagcatatgctcaactctgatcctccagccctgtgccacccttgaccctcttctactgcagccacaggtcctgggaaagtag

SEQ ID NO: 155 - DNA, 333 bp, Homo sapiens; identical to SEQ ID NO: 154

SEQ ID NO: 156 - DNA, 837 bp, Homo sapiens
atggaagagaatatggaagagggacagacacaaaaagggtgttttgaatgctgtatcaaatgcctggggggcattccctatgcctctctgattgccaccatcctgctctatgcgggtgttgccctgttctgtggctgcggtcatgaagcgctttctggaactgtcaacattctgcaaacctactttgagatggcaagaactgctggagacacactggatgtttttaccatgattgacatctttaagtatgtgatctacggcatcgcagctgcgttctttgtgtatggcattttgctgatggtggaaggtttcttcacaactggggccatcaaagatctctatggggatttcaaaatcaccacttgtggcagatgtgtgagcgcttggttcattatgctgacatatcttttcatgttggcctggctgggagtcacggctttcacctcactgccagtttacatgtacttcaatctgtggaccatctgccggaacaccacattagtggagggagcaaatctctgcttggaccttcgtcagtttggaattgtgacaattggagaggaaaagaaaatttgtactgtctctgagaatttcttgaggatgtgcgaatctactgagctgaacatgaccttccacttgtttattgtggcacttgctggagctggggcagcagtcattgctatggttcactaccttatggttctgtctgccaactgggcctatgtgaaagacgcctgccggatgcagaagtatgaagacatcaagtcgaaggaagagcaagagcttcatgacatccactctactcgctccaaagagcggctcaatgcatacacataa

SEQ ID NO: 157 - DNA, 837 bp, Homo sapiens; identical to SEQ ID NO: 156

SEQ ID NO: 158 - DNA, 1713 bp, Homo sapiens
atgtcctaccaaggcaagaagaacatcccgcggatcacgagtgaccgtctccttatcaagggaggcagaatcgtcaatgatgatcagtccttttatgctgatatttacatggaagatggcttaataaaacaaattggagacaatctgattgttcctggaggagtgaagaccattgaagccaatgggaagatggtgatccctggaggcatcgatgtccatactcacttccagatgccatataagggaatgaccacagtagatgacttcttccaagggacaaaggcggccttagcaggtggcaccaccatgatcattgaccatgtggtgcctgagcctgagtccagcctgactgaggcctatgagaaatggagagagtgggctgatgggaagagttgctgtgactatgccctgcatgtggacatcacccactggaatgacagcgtcaagcaggaagtgcagaacctcatcaaggacaaaggggttaactccttcatggtttatatggcttataaggatttgtatcaagtatctaacacagagctctatgagatcttcacctgcctgggagagctgggggccattgctcaagttcatgctgagaatggggatatcattgcccaggagcaaacccgcatgttggaaatggggataactggcccagaaggccatgtactgagcaggccagaagagctggaagctgaggctgtgttccgtgccatcaccattgccagccaaaccaattgccctctctacgtcacaaaggtcatgagcaagagtgcagctgacctcatctcacaagccaggaaaaaaggaaatgtagtctttggtgagcccatcactgccagcctcggcatagatggaacccattattggagcaagaactgggccaaggcggctgcatttgtgacatccccacccctgagccctgacccaactactccggactacatcaactccttgctggccagcggggatctgcagctatctgggagtgcccactgcaccttcagcactgcccagaaagcaattgggaaggacaacttcacagccattcctgagggcaccaatggtgtggaggagcggatgtctgtcatctgggacaaggctgtggccacagggaaaatggacgaaaaccagttcgtggctgtgacaagcacaaacgctgccaagatcttcaacctgtatccccgcaagggaagaatatctgtgggttctgacagcgacctcgtcatctgggatccagatgctgtgaagatcgtctctgccaagaaccaccagtctgcggcagagtacaacatctttgaagggatggagctgcgcggggctcctctggttgtcatctgccagggcaagatcatgctggaagatggcaacctgcacgtgacccagggggctggccgcttcataccctgcagcccgttctccgactatgtctacaagcgcattaaagcacggaggaagatggcagacctgcatgccgtcccaaggggcatgtacgatgggcctgtgtttgacctgaccaccacccccaaaggtggcacccccgcaggctctgctcggggctctcctactcggccgaacccacctgtgaggaatcttcatcagtcgggatttagcctgtcaggcacccaagtggatgagggggttcgctcagccagcaagcgcatcgtggcgcccccaggcggccgttctaatatcacatctctgagttaa

SEQ ID NO: 159 - DNA, 1506 bp, Homo sapiens
atgtctgcactccgaaggaaatttggggacgattatcaggtagtgaccacatcgtccagcggctcgggcttgcagccccaggggccaggccaggaccctcagcagcagcttgtgcccaagaagaagcggcagcggttcgtggacaagaacggccggtgcaatgtacagcacggcaacctgggcagcgagacaagccgctacctctcggacctcttcaccacgctggtggacctcaagtggcgctggaacctcttcatcttcattctcacctacaccgtggcctggcttttcatggcgtccatgtggtgggtgatcgcctacactcggggcgacctgaacaaagcccacgtcggtaactacacgccttgcgtggccaatgtctataacttcccttctgccttcctcttcttcatcgagacggaggccaccatcggctatggctaccgatacatcacagacaagtgccccgagggcatcatcctcttcctcttccagtccatcctgggctccatcgtggacgccttcctcatcggctgcatgttcatcaagatgtcccagcccaagaagcgcgccgagaccctcatgttcagcgagcacgcggtgatctccatgagggacggaaaactcacgcttatgttccgggtgggcaacctgcgcaacagccacatggtctccgcgcagattcgctgcaagctgctcaaatctcggcagacacctgagggtgagttccttccccttgaccaacttgaactggatgtaggttttagtacaggggcagatcaactttttcttgtgtcccccctcacaatttgccacgtgatcgatgccaaaagccccttttatgacctatcccagcgaagcatgcaaactgaacagttcgagattgtcgtcatcctagaaggcattgtggaaacaactgggatgacttgtcaagctcgaacatcatatactgaagatgaagttctttggggtcatcgtttttttcctgtaatttccttagaagagggattctttaaagttgattactcccagttccatgcaacatttgaagtccccaccccaccttacagtgtgaaagagcaggaggaaatgcttctcatgtcgtcccctttaatagcaccagccataactaacagcaaagaaagacataattctgtggaatgcttagatggactagatgatattactacaaaactaccatctaagctgcagaaaattactggaagagaagactttcccaaaaaactcttgaggatgagttctacaacttcagaaaaagcctacagcttgggagacttgcccatgaaacttcaacgaataagttcagttccgggcaactcagaagaaaaactggtatctaaaaccaccaagatgttatctgatcccatgagccagtctgtggctgatttgccaccaaagcttcaaaagatggctggaggagcagctaggatggaagggaaccttccagccaaattaagaaaaatgaactctgatcgcttcacataa

SEQ ID NO: 160 - DNA, 2721 bp, Homo sapiens
atgcagcacatttttgccttcttctgcaccggtttcctaggcgcggtagtaggtgccaatttccccaacaatatccagatcgggggattatttccaaaccagcagtcacaggaacatgctgcttttagatttgctttgtcgcaactcacagagcccccgaagctgctcccccagattgatattgtgaacatcagcgacagctttgagatgacctatagattctgttcccagttctccaaaggagtctatgccatctttgggttttatgaacgtaggactgtcaacatgctgacctccttttgtggggccctccacgtctgcttcattacgccgagctttcccgttgatacatccaatcagtttgtccttcagctgcgccctgaactgcaggatgccctcatcagcatcattgaccattacaagtggcagaaatttgtctacatttatgatgccgaccggggcttatccgtcctgcagaaagtcctggatacagctgctgagaagaactggcaggtgacagcagtcaacattttgacaaccacagaggagggataccggatgctctttcaggacctggagaagaaaaaggagcggctggtggtggtggactgtgaatcagaacgcctcaatgctatcttgggccagattataaagctagagaagaatggcatcggctaccactacattcttgcaaatctgggcttcatggacattgacttaaacaaattcaaggagagtggcgccaatgtgacaggtttccagctggtgaactacacagacactattccggccaagatcatgcagcagtggaagaatagtgatgctcgagaccacacacgggtggactggaagagacccaagtacacctctgcgctcacctacgatggggtgaaggtgatggctgaggctttccagagcctgcggaggcagagaattgatatatctcgccgggggaatgctggggattgtctggctaacccagctgttccctggggccaagggatcgacatccagagagctctgcagcaggtgcgatttgaaggtttaacaggaaacgtgcagtttaatgagaaaggacgccggaccaactacacgctccacgtgattgaaatgaaacatgacggcatccgaaagattggttactggaatgaagatgataagtttgtccctgcagccaccgatgcccaagctgggggcgataattcaagtgttcagaacagaacatacatcgtcacaacaatcctagaagatccttatgtgatgctcaagaagaacgccaatcagtttgagggcaatgaccgttacgagggctactgtgtagagctggcggcagagattgccaagcacgtgggctactcctaccgtctggagattgtcagtgatggaaaatacggagcccgagaccctgacacgaaggcctggaatggcatggtgggagagctggtctatggaagagcagatgtggctgtggctcccttaactatcactttggtccgggaagaagttatagatttctccaaaccatttatgagtttggggatctccatcatgattaaaaaaccacagaaatccaagccgggtgtcttctccttccttgatcctttggcttatgagatttggatgtgcattgtttttgcctacattggagtgagtgttgtcctcttcctggtcagccgcttcagtccctatgaatggcacagtgaagagtttgaggaaggacgggaccagacaaccagtgaccagtccaatgagtttgggatattcaacagtttgtggttctccctgggagccttcatgcagcaaggatgtgacatttctcccaggtccctgtctggtcgcatcgttggtggcgtctggtggttcttcaccttaatcatcatctcctcatatacagccaatctggccgccttcctgaccgtggagaggatggtgtctcccattgagagtgcagaggacctagcgaagcagacagaaattgcctacgggacgctggaagcaggatctactaaggagttcttcaggaggtctaaaattgctgtgtttgagaagatgtggacatacatgaagtcagcagagccatcagtttttgtgcggaccacagaggaggggatgattcgagtgaggaaatccaaaggcaaatatgcctacctcctggagtccaccatgaatgagtacattgagcagcggaaaccctgtgacaccatgaaggtgggaggtaacttggattccaaaggctatggcattgcaacacccaaggggtctgccctgagaaatccagtaaacctggcagtgttaaaactgaacgagcaggggcttttggacaaattgaaaaacaaatggtggtacgacaagggcgagtgcggcagcgggggaggtgattccaaggacaagacaagcgctctgagcctcagcaatgtggcaggcgtgttctacatcctgatcggaggacttggactagccatgctggttgccttaatcgagttctgctacaaatcccgtagtgaatccaagcggatgaagggtttttgtttgatcccacagcaatccatcaacgaagccatacggacatcgaccctcccccgcaacagcggggcaggagccagcagcggcggcagtggagagaatggtcgggtggtcagccatgacttccccaagtccatgcaatcgattccttgcatgagccacagttcagggatgcccttgggagccacgggattgtaa

SEQ ID NO: 161 - DNA, 1221 bp, Homo sapiens
atggcggcaggcgccggggccgggtccgcgccgcgctggctgagggcgctgagcgagccgctgagcgcggcgcagctgcggcgactggaggagcaccgctacagcgcggcgggcgtctcgctgctcgagccgccgctgcagctctactggacctggctgctccagtggatcccgctctggatggcccccaactccatcaccctgctggggctcgccgtcaacgtggtcaccacgctcgtgctcatctcctactgtcccacggccaccgaagaggcaccatactggacataccttttatgtgcactgggactttttatttaccagtcactggatgctattgatgggaaacaagccagaagaacaaactcttgttcccctttaggggagctctttgaccatggctgtgactctctttccacagtatttatggcagtgggagcttcaattgccgctcgcttaggaacttatcctgactggttttttttctgctcttttattgggatgtttgtgttttattgcgctcattggcagacttatgtttcaggcatgttgagatttggaaaagtggatgtaactgaaattcagatagctttagtgattgtctttgtgttgtctgcatttggaggagcaacaatgtgggactatacgattcctattctagaaataaaattgaagatccttccagttcttggatttctaggtggagtaatattttcctgttcaaattatttccatgttatcctccatggtggtgttggcaagaatggatccactatagcaggcaccagtgtcttgtcacctggactccacataggactaattattatactggcaataatgatctataaaaagtcagcaactgatgtgtttgaaaagcatccttgtctttatatcctaatgtttggatgtgtctttgctaaagtctcacaaaaattagtggtagctcacatgaccaaaagtgaactatatcttcaagacactgtctttttggggccaggtcttttgtttttagaccagtactttaataactttatagacgaatatgttgttctatggatggcaatggtgatttcttcatttgatatggtgatatactttagtgctttgtgcctgcaaatttcaagacaccttcatctaaatatattcaagactgcatgtcatcaagcacctgaacaggttcaagttctttcttcaaagagtcatcagaataacatggattga

SEQ ID NO: 162 - DNA, 711 bp, Homo sapiens
atggaaagctctgccaagatggagagcggcggcgccggccagcagccccagccgcagccccagcagcccttcctgccgcccgcagcctgtttctttgccacggccgcagccgcggcggccgcagccgccgcagcggcagcgcagagcgcgcagcagcagcagcagcagcagcagcagcagcagcaggcgccgcagctgagaccggcggccgacggccagccctcagggggcggtcacaagtcagcgcccaagcaagtcaagcgacagcgctcgtcttcgcccgaactgatgcgctgcaaacgccggctcaacttcagcggctttggctacagcctgccgcagcagcagccggccgccgtggcgcgccgcaacgagcgcgagcgcaaccgcgtcaagttggtcaacctgggctttgccacccttcgggagcacgtccccaacggcgcggccaacaagaagatgagtaaggtggagacactgcgctcggcggtcgagtacatccgcgcgctgcagcagctgctggacgagcatgacgcggtgagcgccgccttccaggcaggcgtcctgtcgcccaccatctcccccaactactccaacgacttgaactccatggccggctcgccggtctcatcctactcgtcggacgagggctcttacgacccgctcagccccgaggagcaggagcttctcgacttcaccaactggttctga

SEQ ID NO: 163 - DNA, 2109 bp, Homo sapiens
atggagtctccctcggcccctccccacagatggtgcatcccctggcagaggctcctgctcacagcctcacttctaaccttctggaacccgcccaccactgccaagctcactattgaatccacgccgttcaatgtcgcagaggggaaggaggtgcttctacttgtccacaatctgccccagcatctttttggctacagctggtacaaaggtgaaagagtggatggcaaccgtcaaattataggatatgtaataggaactcaacaagctaccccagggcccgcatacagtggtcgagagataatataccccaatgcatccctgctgatccagaacatcatccagaatgacacaggattctacaccctacacgtcataaagtcagatcttgtgaatgaagaagcaactggccagttccgggtatacccggagctgcccaagccctccatctccagcaacaactccaaacccgtggaggacaaggatgctgtggccttcacctgtgaacctgagactcaggacgcaacctacctgtggtgggtaaacaatcagagcctcccggtcagtcccaggctgcagctgtccaatggcaacaggaccctcactctattcaatgtcacaagaaatgacacagcaagctacaaatgtgaaacccagaacccagtgagtgccaggcgcagtgattcagtcatcctgaatgtcctctatggcccggatgcccccaccatttcccctctaaacacatcttacagatcaggggaaaatctgaacctctcctgccacgcagcctctaacccacctgcacagtactcttggtttgtcaatgggactttccagcaatccacccaagagctctttatccccaacatcactgtgaataatagtggatcctatacgtgccaagcccataactcagacactggcctcaataggaccacagtcacgacgatcacagtctatgcagagccacccaaacccttcatcaccagcaacaactccaaccccgtggaggatgaggatgctgtagccttaacctgtgaacctgagattcagaacacaacctacctgtggtgggtaaataatcagagcctcccggtcagtcccaggctgcagctgtccaatgacaacaggaccctcactctactcagtgtcacaaggaatgatgtaggaccctatgagtgtggaatccagaacaaattaagtgttgaccacagcgacccagtcatcctgaatgtcctctatggcccagacgaccccaccatttccccctcatacacctattaccgtccaggggtgaacctcagcctctcctgccatgcagcctctaacccacctgcacagtattcttggctgattgatgggaacatccagcaacacacacaagagctctttatctccaacatcactgagaagaacagcggactctatacctgccaggccaataactcagccagtggccacagcaggactacagtcaagacaatcacagtctctgcggagctgcccaagccctccatctccagcaacaactccaaacccgtggaggacaaggatgctgtggccttcacctgtgaacctgaggctcagaacacaacctacctgtggtgggtaaatggtcagagcctcccagtcagtcccaggctgcagctgtccaatggcaacaggaccctcactctattcaatgtcacaagaaatgacgcaagagcctatgtatgtggaatccagaactcagtgagtgcaaaccgcagtgacccagtcaccctggatgtcctctatgggccggacacccccatcatttcccccccagactcgtcttacctttcgggagcgaacctcaacctctcctgccactcggcctctaacccatccccgcagtattcttggcgtatcaatgggataccgcagcaacacacacaagttctctttatcgccaaaatcacgccaaataataacgggacctatgcctgttttgtctctaacttggctactggccgcaataattccatagtcaagagcatcacagtctctgcatctggaacttctcctggtctctcagctggggccactgtcggcatcatgattggagtgctggttggggttgctctgatatag

SEQ ID NO: 164 - DNA, 3480 bp, Homo sapiens
atgccggtgcggaggggccacgtcgcgccgcagaacaccttcctggacaccatcatccgcaagtttgagggccagagccgtaagttcatcatcgccaacgctcgggtggagaactgcgccgtcatctactgcaacgacggcttctgcgagctgtgcggctactcgcgggccgaggtgatgcagcgaccctgcacctgcgacttcctgcacgggccgcgcacgcagcgccgcgctgccgcgcagatcgcgcaggcactgctgggcgccgaggagcgcaaagtggaaatcgccttctaccggaaagatgggagctgcttcctatgtctggtggatgtggtgcccgtgaagaacgaggatggggctgtcatcatgttcatcctcaatttcgaggtggtgatggagaaggacatggtggggtccccggctcatgacaccaaccaccggggcccccccaccagctggctggccccaggccgcgccaagaccttccgcctgaagctgcccgcgctgctggcgctgacggcccgggagtcgtcggtgcggtcgggcggcgcgggcggcgcgggcgccccgggggccgtggtggtggacgtggacctgacgcccgcggcacccagcagcgagtcgctggccctggacgaagtgacagccatggacaaccacgtggcagggctcgggcccgcggaggagcggcgtgcgctggtgggtcccggctctccgccccgcagcgcgcccggccagctcccatcgccccgggcgcacagcctcaaccccgacgcctcgggctccagctgcagcctggcccggacgcgctcccgagaaagctgcgccagcgtgcgccgcgcctcgtcggccgacgacatcgaggccatgcgcgccggggtgctgcccccgccaccgcgccacgccagcaccggggccatgcacccactgcgcagcggcttgctcaactccacctcggactccgacctcgtgcgctaccgcaccattagcaagattccccaaatcaccctcaactttgtggacctcaagggcgaccccttcttggcttcgcccaccagtgaccgtgagatcatagcacctaagataaaggagcgaacccacaatgtcactgagaaggtcacccaggtcctgtccctgggcgccgacgtgctgcctgagtacaagctgcaggcaccgcgcatccaccgctggaccatcctgcattacagccccttcaaggccgtgtgggactggctcatcctgctgctggtcatctacacggctgtcttcacaccctactcggctgccttcctgctgaaggagacggaagaaggcccgcctgctaccgagtgtggctacgcctgccagccgctggctgtggtggacctcatcgtggacatcatgttcattgtggacatcctcatcaacttccgcaccacctacgtcaatgccaacgaggaggtggtcagccaccccggccgcatcgccgtccactacttcaagggctggttcctcatcgacatggtggccgccatccccttcgacctgctcatcttcggctctggctctgaggagctgatcgggctgctgaagactgcgcggctgctgcggctggtgcgcgtggcgcggaagctggatcgctactcagagtacggcgcggccgtgctgttcttgctcatgtgcacctttgcgctcatcgcgcactggctagcctgcatctggtacgccatcggcaacatggagcagccacacatggactcacgcatcggctggctgcacaacctgggcgaccagataggcaaaccctacaacagcagcggcctgggcggcccctccatcaaggacaagtatgtgacggcgctctacttcaccttcagcagcctcaccagtgtgggcttcggcaacgtctctcccaacaccaactcagagaagatcttctccatctgcgtcatgctcattggctccctcatgtatgctagcatcttcggcaacgtgtcggccatcatccagcggctgtactcgggcacagcccgctaccacacacagatgctgcgggtgcgggagttcatccgcttccaccagatccccaatcccctgcgccagcgcctcgaggagtacttccagcacgcctggtcctacaccaacggcatcgacatgaacgcggtgctgaagggcttccctgagtgcctgcaggctgacatctgcctgcacctgaaccgctcactgctgcagcactgcaaacccttccgaggggccaccaagggctgccttcgggccctggccatgaagttcaagaccacacatgcaccgccaggggacacactggtgcatgctggggacctgctcaccgccctgtacttcatctcccggggctccatcgagatcctgcggggcgacgtcgtcgtggccatcctggggaagaatgacatctttggggagcctctgaacctgtatgcaaggcctggcaagtcgaacggggatgtgcgggccctcacctactgtgacctacacaagatccatcgggacgacctgctggaggtgctggacatgtaccctgagttctccgaccacttctggtccagcctggagatcaccttcaacctgcgagataccaacatgatcccgggctcccccggcagtacggagttagagggtggcttcagtcggcaacgcaagcgcaagttgtccttccgcaggcgcacggacaaggacacggagcagccaggggaggtgtcggccttggggccgggccgggcgggggcagggccgagtagccggggccggccgggggggccgtggggggagagcccgtccagtggcccctccagccctgagagcagtgaggatgagggcccaggccgcagctccagccccctccgcctggtgcccttctccagccccaggccccccggagagccgccgggtggggagcccctgatggaggactgcgagaagagcagcgacacttgcaaccccctgtcaggcgccttctcaggagtgtccaacattttcagcttctggggggacagtcggggccgccagtaccaggagctccctcgatgccccgcccccacccccagcctcctcaacatccccctctccagcccgggtcggcggccccggggcgacgtggagagcaggctggatgccctccagcgccagctcaacaggctggagacccggctgagtgcagacatggccactgtcctgcagctgctacagaggcagatgacgctggtcccgcccgcctacagtgctgtgaccaccccggggcctggccccacttccacatccccgctgttgcccgtcagccccctccccaccctcaccttggactcgctttctcaggtttcccagttcatggcgtgtgaggagctgcccccgggggccccagagcttccccaagaaggccccacacgacgcctctccctaccgggccagctgggggccctcacctcccagcccctgcacagacacggctcggacccgggcagttag

SEQ ID NO: 165 - DNA, 3129 bp, Homo sapiens
atggagaacgcgcacaccaagacggtggaggaggtgctgggccacttcggcgtcaacgagagtacggggctgagcctggaacaggtcaagaagcttaaggagagatggggctccaacgagttaccggctgaagaaggaaaaaccttgctggaacttgtgattgagcagtttgaagacttgctagttaggattttattactggcagcatgtatatcttttgttttggcttggtttgaagaaggtgaagaaacaattacagcctttgtagaaccttttgtaattttactcatattagtagccaatgcaattgtgggtgtatggcaggaaagaaatgctgaaaatgccatcgaagcccttaaggaatatgagcctgaaatgggcaaagtgtatcgacaggacagaaagagtgtgcagcggattaaagctaaagacatagttcctggtgatattgtagaaattgctgttggtgacaaagttcctgctgatataaggttaacttccatcaaatctaccacactaagagttgaccagtcaattctcacaggtgaatctgtctctgtcatcaagcacactgatcccgtccctgacccacgagctgtcaaccaagataaaaagaacatgctgttttctggtacaaacattgctgctgggaaagctatgggagtggtggtagcaactggagttaacaccgaaattggcaagatccgggatgaaatggtggcaacagaacaggagagaacaccccttcagcaaaaactagatgaatttggggaacagctttccaaagtcatctcccttatttgcattgcagtctggatcataaatattgggcacttcaatgacccggttcatggagggtcctggatcagaggtgctatttactactttaaaattgcagtggccctggctgtagcagccattcctgaaggtctgcctgcagtcatcaccacctgcctggctcttggaactcgcagaatggcaaagaaaaatgccattgttcgaagcctcccgtctgtggaaacccttggttgtacttctgttatctgctcagacaagactggtacacttacaacaaaccagatgtcagtctgcaggatgttcattctggacagagtggaaggtgatacttgttcccttaatgagtttaccataactggatcaacttatgcacctattggagaagtgcataaagatgataaaccagtgaattgtcaccagtatgatggtctggtagaattagcaacaatttgtgctctttgtaatgactctgctttggattacaatgaggcaaagggtgtgtatgaaaaagttggagaagctacagagactgctctcacttgcctagtagagaagatgaatgtatttgataccgaattgaagggtctttctaaaatagaacgtgcaaatgcctgcaactcagtcattaaacagctgatgaaaaaggaattcactctagagttttcacgtgacagaaagtcaatgtcggtttactgtacaccaaataaaccaagcaggacatcaatgagcaagatgtttgtgaagggtgctcctgaaggtgtcattgacaggtgcacccacattcgagttggaagtactaaggttcctatgacctctggagtcaaacagaagatcatgtctgtcattcgagagtggggtagtggcagcgacacactgcgatgcctggccctggccactcatgacaacccactgagaagagaagaaatgcaccttgaggactctgccaactttattaaatatgagaccaatctgaccttcgttggctgcgtgggcatgctggatcctccgagaatcgaggtggcctcctccgtgaagctgtgccggcaagcaggcatccgggtcatcatgatcactggggacaacaagggcactgctgtggccatctgtcgccgcatcggcatcttcgggcaggatgaggacgtgacgtcaaaagctttcacaggccgggagtttgatgaactcaacccctccgcccagcgagacgcctgcctgaacgcccgctgttttgctcgagttgaaccctcccacaagtctaaaatcgtagaatttcttcagtcttttgatgagattacagctatgactggcgatggcgtgaacgatgctcctgctctgaagaaagccgagattggcattgctatgggctctggcactgcggtggctaaaaccgcctctgagatggtcctggcggatgacaacttctccaccattgtggctgccgttgaggaggggcgggcaatctacaacaacatgaaacagttcatccgctacctcatctcgtccaacgtcggggaagttgtctgtattttcctgacagcagcccttggatttcccgaggctttgattcctgttcagctgctctgggtcaatctggtgacagatggcctgcctgccactgcactggggttcaaccctcctgatctggacatcatgaataaacctccccggaacccaaaggaaccattgatcagcgggtggctctttttccgttacttggctattggctgttacgtcggcgctgctaccgtgggtgctgctgcatggtggttcattgctgctgacggtggtccaagagtgtccttctaccagctgagtcatttcctacagtgtaaagaggacaacccggactttgaaggcgtggattgtgcaatctttgaatccccatacccgatgacaatggcgctctctgttctagtaactatagaaatgtgtaacgccctcaacagcttgtccgaaaaccagtccttgctgaggatgcccccctgggagaacatctggctcgtgggctccatctgcctgtccatgtcactccacttcctgatcctctatgtcgaacccttgccactcatcttccagatcacaccgctgaacgtgacccagtggctgatggtgctgaaaatctccttgcccgtgattctcatggatgagacgctcaagtttgtggcccgcaactacctggaacctggtaaagagtgtgtgcagcctgccaccaaatcctgctcgttctcggcatgcaccgatgggatttcctggccgtttgtgctgctcataatgcccctggtgatctgggtctatagcacagacactaactttagcgatatgttctggtcttga

SEQ ID NO: 166 - DNA, 1554 bp, Homo sapiens
atgttgcgcgctgccgcccgcttcgggccccgcctgggccgccgcctcttgtcagccgccgccacccaggccgtgcctgcccccaaccagcagcccgaggtcttctgcaaccagattttcataaacaatgaatggcacgatgccgtcagcaggaaaacattccccaccgtcaatccgtccactggagaggtcatctgtcaggtagctgaaggggacaaggaagatgtggacaaggcagtgaaggccgcccgggccgccttccagctgggctcaccttggcgccgcatggacgcatcacacaggggccggctgctgaaccgcctggccgatctgatcgagcgggaccggacctacctggcggccttggagaccctggacaatggcaagccctatgtcatctcctacctggtggatttggacatggtcctcaaatgtctccggtattatgccggctgggctgataagtaccacgggaaaaccatccccattgacggagacttcttcagctacacacgccatgaacctgtgggggtgtgcgggcagatcattccgtggaatttcccgctcctgatgcaagcatggaagctgggcccagccttggcaactggaaacgtggttgtgatgaaggtagctgagcagacacccctcaccgccctctatgtggccaacctgatcaaggaggctggctttccccctggtgtggtcaacattgtgcctggatttggccccacggctggggccgccattgcctcccatgaggatgtggacaaagtggcattcacaggctccactgagattggccgcgtaatccaggttgctgctgggagcagcaacctcaagagagtgaccttggagctgggggggaagagccccaacatcatcatgtcagatgccgatatggattgggccgtggaacaggcccacttcgccctgttcttcaaccagggccagtgctgctgtgccggctcccggaccttcgtgcaggaggacatctatgatgagtttgtggagcggagcgttgcccgggccaagtctcgggtggtcgggaacccctttgatagcaagaccgagcaggggccgcaggtggatgaaactcagtttaagaagatcctcggctacatcaacacggggaagcaagagggggcgaagctgctgtgtggtgggggcattgctgctgaccgtggttacttcatccagcccactgtgtttggagatgtgcaggatggcatgaccatcgccaaggaggagatcttcgggccagtgatgcagatcctgaagttcaagaccatagaggaggttgttgggagagccaacaattccacgtacgggctggccgcagctgtcttcacaaaggatttggacaaggccaattacctgtcccaggccctccaggcgggcactgtgtgggtcaactgctatgatgtgtttggagcccagtcaccctttggtggctacaagatgtcggggagtggccgggagttgggcgagtacgggctgcaggcatacactgaagtgaaaactgtcacagtcaaagtgcctcagaagaactcataa

SEQ ID NO: 167 - DNA, 1200 bp, Homo sapiens
atgtcagatatcctccgggagctgctctgtgtctctgagaaggctgctaacattgcccgggcgtgcagacagcaggaagccctcttccagctgctgatcgaagaaaagaaagagggagaaaagaacaagaagtttgcagttgacttcaagacgctggctgatgtactggtacaggaagttataaaacagaatatggagaacaagtttccaggcttggaaaaaaatatttttggagaagaatccaatgagtttactaatgactggggggaaaagattaccttgaggttgtgttcaacagaggaggaaacagcagagcttcttagcaaagtcctcaatggtaacaaggtggcatctgaagcattagccagggttgttcatcaggatgttgcctttactgacccaactctggattccacagagatcaatgttccacaggacattttgggaatttgggtggaccccatagattcaacttatcagtatataaaaggttctgctgacattaaatccaaccagggaatcttcccctgtggacttcagtgtgtcaccattttaattggtgtctatgacatacagacaggggttcccctgatgggagtcatcaatcaaccttttgtgtcacgagatccaaacaccctcaggtggaaaggacagtgctattggggcctttcttacatggggaccaacatgcattcactacagctcaccatctctagaagaaacggcagtgaaacacacactggaaacaccggctctgaggcagcattctcccccagtttttcagccgtaattagtacaagtgaaaaggagactatcaaagctgcattgtcacgtgtgtgtggagatcgcatatttggggcagctggggctggttataagagcctatgtgttgtccaaggcctcgttgacatttacatcttttcagaagataccacattcaaatgggactcttgtgctgctcatgccatactgagggccatgggtgggggaatagtagacttgaaagaatgcttagaaagaaatccagaaacagggcttgatttgccacagttggtgtaccacgtggaaaatgagggtgctgctggggtggatcggtgggccaacaagggaggactcattgcatacagatccaggaagcggctggagacattcctgagcctcctggtccaaaacctggcacctgcagagacgcatacctag

SEQ ID NO: 168 - DNA, 1254 bp, Homo sapiens
atgttggcactcttggttctggtgactgtggccctggcatctgctcatcatggtggtgagcactttgaaggcgagaaggtgttccgtgttaacgttgaagatgaaaatcacattaacataatccgcgagttggccagcacgacccagattgacttctggaagccagattctgtcacacaaatcaaacctcacagtacagttgacttccgtgttaaagcagaagatactgtcactgtggagaatgttctaaagcagaatgaactacaatacaaggtactgataagcaacctgagaaatgtggtggaggctcagtttgatagccgggttcgtgcaacaggacacagttatgagaagtacaacaagtgggaaacgatagaggcttggactcaacaagtcgccactgagaatccagccctcatctctcgcagtgttatcggaaccacatttgagggacgcgctatttacctcctgaaggttggcaaagctggacaaaataagcctgccattttcatggactgtggtttccatgccagagagtggatttctcctgcattctgccagtggtttgtaagagaggctgttcgtacctatggacgtgagatccaagtgacagagcttctcgacaagttagacttttatgtcctgcctgtgctcaatattgatggctacatctacacctggaccaagagccgattttggagaaagactcgctccacccatactggatctagctgcattggcacagaccccaacagaaattttgatgctggttggtgtgaaattggagcctctcgaaacccctgtgatgaaacttactgtggacctgccgcagagtctgaaaaggagaccaaggccctggctgatttcatccgcaacaaactctcttccatcaaggcatatctgacaatccactcgtactcccaaatgatgatctacccttactcatatgcttacaaactcggtgagaacaatgctgagttgaatgccctggctaaagctactgtgaaagaacttgcctcactgcacggcaccaagtacacatatggcccgggagctacaacaatctatcctgctgctgggggctctgacgactgggcttatgaccaaggaatcagatattccttcacctttgaacttcgagatacaggcagatatggctttctccttccagaatcccagatccgggctacctgcgaggagaccttcctggcaatcaagtatgttgccagctacgtcctggaacacctgtactag

SEQ ID NO: 169 - DNA, 987 bp, Homo sapiens
atgggggctgcagctcgtctgagcgcccctcgagcgctggtactctgggctgcactgggggcagcagctcacatcggaccagcacctgaccccgaggactggtggagctacaaggataatctccagggaaacttcgtgccagggcctcctttctggggcctggtgaatgcagcgtggagtctgtgtgctgtggggaagcggcagagccccgtggatgtggagctgaagagggttctttatgacccctttctgcccccattaaggctcagcactggaggagagaagctccggggaaccttgtacaacaccggccgacatgtctccttcctgcctgcaccccgacctgtggtcaatgtgtctggaggtcccctcctttacagccaccgactcagtgaactgcggctgctgtttggagctcgcgacggagccggctcggaacatcagatcaaccaccagggcttctctgctgaggtgcagctcattcacttcaaccaggaactctacgggaatttcagcgctgcctcccgcggccccaatggcctggccattctcagcctctttgtcaacgttgccagtacctctaacccattcctcagtcgcctccttaaccgcgacaccatcactcgcatctcctacaagaatgatgcctactttcttcaagacctgagcctggagctcctgttccctgaatccttcggcttcatcacctatcagggctctctcagcaccccgccctgctccgagactgtcacctggatcctcattgaccgggccctcaatatcacctcccttcagatgcactccctgagactcctgagccagaatcctccatctcagatcttccagagcctcagcggtaacagccggcccctgcagcccttggcccacagggcactgaggggcaacagggacccccggcaccccgagaggcgctgccgaggccccaactaccgcctgcatgtggatggtgtcccccatggtcgctga

SEQ ID NO: 170 - DNA, 1005 bp, Homo sapiens
atgggacggcccgctgggctgttcccgcccctatgcccttttttgggtttccggccagaggcatgctgggagcgtcacatgcaaattgagcgtgcacccagcgttccgccctttctacgctgggccggttatcgacccggcccagtgcgcaggcgcgggaaagttgaactaataaagtttgtacgagttcagtggaggagaccgcaagttgagtggaggaggcggcggtggggccccggaccaggtgcctccatggcaggctctgaagagctggggctccgggaagacacgctgagggtcctagctgccttccttaggcgtggtgaggctgccgggtctcctgttccaactccacctagaagccctgcccaagaagagccaacagacttcctgagccgccttcgaagatgtcttccctgctccctggggcgaggagcagccccctctgagtcccctcggccttgctctctgcccatccgcccctgctatggtttagagcctggcccagctactccagacttctatgctttggtggcccagcggctggaacagctggtccaagagcagctgaaatctccgcccagcccagaattacagggtcccccatcgacagagaaggaagccatactgcggaggctggtggccctgctggaggaggaggcagaagtcattaaccagaagctggcctcggaccccgccctgcgcagcaagctggtccgcctgtcctccgactctttcgcccgcctggtggagctgttctgtagccgggatgacagctctcgcccaagccgagcatgccccgggcccccgcctccttccccggagcccctggcccgcctggccctagccatggagctgagccggcgcgtggccgggctggggggcaccctggccggactcagcgtggagcacgtgcacagcttcacgccctggatccaggcccacgggggctgggagggcatcctggctgtttcacccgtggacttgaacttgccattggactga

SEQ ID NO: 171 - DNA, 2652 bp, Homo sapiens
atggctgaaaatagtgtattaacatccactactgggaggactagcttggcagactcttccatttttgattctaaagttactgagatttccaaggaaaacttacttattggatctacttcatatgtagaagaagagatgcctcagattgaaacaagagtgatattggttcaagaagctggaaaacaagaagaacttataaaagccttaaaggacattaaagtgggctttgtaaagatggagtcagtggaagaatttgaaggtttggattctccggaatttgaaaatgtatttgtagtcacggactttcaggattctgtctttaatgacctctacaaggctgattgtagagttattggaccaccagttgtattaaattgttcacaaaaaggagagcctttgccattttcatgtcgcccgttgtattgtacaagtatgatgaatctagtactatgctttactggatttaggaaaaaagaagaactagtcaggttggtgacattggtccatcacatgggtggagttattcgaaaagactttaattcaaaagttacacatttggtggcaaattgtacacaaggagaaaaattcagggttgctgtgagtctaggtactccaattatgaagccagaatggatttataaagcttgggaaaggcggaatgaacaggatttctatgcagcagttgatgactttagaaatgaatttaaagttcctccatttcaagattgtattttaagtttcctgggattttcagatgaagagaaaaccaatatggaagaaatgactgaaatgcaaggaggtaaatatttaccgcttggagatgaaagatgcactcaccttgtagttgaagagaatatagtaaaagatcttccctttgaaccttcaaagaaactttatgttgtcaagcaagagtggttctggggaagcattcaaatggatgcccgagctggagaaactatgtatttatatgaaaaggcaaatactcctgagctcaagaaatcagtgtcaatgctttctctaaatacccctaacagcaatcgcaaacgacgtcgtttaaaagaaacacttgctcagctttcaagagagacagacgtgtcaccatttccaccccgtaagcgcccatcagctgagcattccctttccatagggtcactcctagatatctccaacacaccagagtctagcattaactatggagacaccccaaagtcttgtactaagtcttctaaaagctccactccagttccttcaaagcagtcagcaaggtggcaagttgcaaaagagctttatcaaactgaaagtaattatgttaatatattggcaacaattattcagttatttcaagtaccattggaagaggaaggacaacgtggtggacctatccttgcaccagaggagattaagactatttttggtagcatcccagatatctttgatgtacacactaagataaaggatgatcttgaagaccttatagttaattgggatgagagcaaaagcattggtgacatttttctgaaatattcaaaagatttggtaaaaacctaccctccctttgtaaacttctttgaaatgagcaaggaaacaattattaaatgtgaaaaacagaaaccaagatttcatgcttttctcaagataaaccaagcaaaaccagaatgtggacggcagagccttgttgaacttcttatccgaccagtacagaggttacccagtgttgcattacttttaaatgatcttaagaagcatacagctgatgaaaatccagacaaaagcactttagaaaaagctattggatcactgaaggaagtaatgacgcatattaatgaggataagagaaaaacagaagctcaaaagcaaatttttgatgttgtttatgaagtagatggatgcccagctaatcttttatcttctcaccgaagcttagtacagcgggttgaaacaatttctctaggtgagcacccctgtgacagaggagaacaagtaactctcttcctcttcaatgattgcctagagatagcaagaaaacggcacaaggttattggcacttttaggagtcctcatggccaaacccgacccccagcttctcttaagcatattcacctaatgcctctttctcagattaagaaggtattggacataagagagacagaagattgccataatgcttttgccttgcttgtgaggccaccaacagagcaggcaaatgtgctactcagtttccagatgacatcagatgaacttccaaaagaaaactggctaaagatgctgtgtcgacatgtagctaacaccatttgtaaagcagatgctgagaatcttatttatactgctgatccagaatcctttgaagtaaatacaaaagatatggacagtacattgagtagagcatcaagagcaataaaaaagacttcaaaaaaggttacaagagcattctctttctccaaaactccaaaaagagctcttcgaagggctcttatgacatcccacggctcagtggagggaagaagtccttccagcaatgataagcatgtaatgagtcgtctttctagcacatcatcattagcaggtatcccttctccctcccttgtcagccttccttccttctttgaaaggagaagtcatacgttaagtagatctacaactcatttgatatga

SEQ ID NO: 172 - DNA, 1392 bp, Homo sapiens
atgggcaaggagaagacccacatcaacatcgtggtcatcggccacgtggactccggaaagtccaccaccacgggccacctcatctacaaatgcggaggtattgacaaaaggaccattgagaagttcgagaaggaggcggctgagatggggaagggatccttcaagtatgcctgggtgctggacaagctgaaggcggagcgtgagcgcggcatcaccatcgacatctccctctggaagttcgagaccaccaagtactacatcaccatcatcgatgcccccggccaccgcgacttcatcaagaacatgatcacgggtacatcccaggcggactgcgcagtgctgatcgtggcggcgggcgtgggcgagttcgaggcgggcatctccaagaatgggcagacgcgggagcatgccctgctggcctacacgctgggtgtgaagcagctcatcgtgggcgtgaacaaaatggactccacagagccggcctacagcgagaagcgctacgacgagatcgtcaaggaagtcagcgcctacatcaagaagatcggctacaacccggccaccgtgccctttgtgcccatctccggctggcacggtgacaacatgctggagccctcccccaacatgccgtggttcaagggctggaaggtggagcgtaaggagggcaacgcaagcggcgtgtccctgctggaggccctggacaccatcctgccccccacgcgccccacggacaagcccctgcgcctgccgctgcaggacgtgtacaagattggcggcattggcacggtgcccgtgggccgggtggagaccggcatcctgcggccgggcatggtggtgacctttgcgccagtgaacatcaccactgaggtgaagtcagtggagatgcaccacgaggctctgagcgaagctctgcccggcgacaacgtcggcttcaatgtgaagaacgtgtcggtgaaggacatccggcggggcaacgtgtgtggggacagcaagtctgacccgccgcaggaggctgctcagttcacctcccaggtcatcatcctgaaccacccggggcagattagcgccggctactccccggtcatcgactgccacacagcccacatcgcctgcaagtttgcggagctgaaggagaagattgaccggcgctctggcaagaagctggaggacaaccccaagtccctgaagtctggagacgcggccatcgtggagatggtgccgggaaagcccatgtgtgtggagagcttctcccagtacccgcctctcggccgcttcgccgtgcgcgacatgaggcagacggtggccgtaggcgtcatcaagaacgtggagaagaagagcggcggcgccggcaaggtcaccaagtcggcgcagaaggcgcagaaggcgggcaagtga

SEQ ID NO: 173 - DNA, 3774 bp, Homo sapiens
atggtcgtggcgctgcggtacgtgtggcctctcctcctctgcagcccctgcctgcttatccagatccccgaggaatatgaaggacaccatgtgatggagccacctgtcatcacggaacagtctccacggcgcctggttgtcttccccacagatgacatcagcctcaagtgtgaggccagtggcaagcccgaagtgcagttccgctggacgagggatggtgtccacttcaaacccaaggaagagctgggtgtgaccgtgtaccagtcgccccactctggctccttcaccatcacgggcaacaacagcaactttgctcagaggttccagggcatctaccgctgctttgccagcaataagctgggcaccgccatgtcccatgagatccggctcatggccgagggtgcccccaagtggccaaaggagacagtgaagcccgtggaggtggaggaaggggagtcagtggttctgccttgcaaccctcccccaagtgcagagcctctccggatctactggatgaacagcaagatcttgcacatcaagcaggacgagcgggtgacgatgggccagaacggcaacctctactttgccaatgtgctcacctccgacaaccactcagactacatctgccacgcccacttcccaggcaccaggaccatcattcagaaggaacccattgacctccgggtcaaggccaccaacagcatgattgacaggaagccgcgcctgctcttccccaccaactccagcagccacctggtggccttgcaggggcagccattggtcctggagtgcatcgccgagggctttcccacgcccaccatcaaatggctgcgccccagtggccccatgccagccgaccgtgtcacctaccagaaccacaacaagaccctgcagctgctgaaagtgggcgaggaggatgatggcgagtaccgctgcctggccgagaactcactgggcagtgcccggcatgcgtactatgtcaccgtggaggctgccccgtactggctgcacaagccccagagccatctatatgggccaggagagactgcccgcctggactgccaagtccagggcaggccccaaccagaggtcacctggagaatcaacgggatccctgtggaggagctggccaaagaccagaagtaccggattcagcgtggcgccctgatcctgagcaacgtgcagcccagtgacacaatggtgacccaatgtgaggcccgcaaccggcacgggctcttgctggccaatgcctacatctacgttgtccagctgccagccaagatcctgactgcggacaatcagacgtacatggctgtccagggcagcactgcctaccttctgtgcaaggccttcggagcgcctgtgcccagtgttcagtggctggacgaggatgggacaacagtgcttcaggacgaacgcttcttcccctatgccaatgggaccctgggcattcgagacctccaggccaatgacaccggacgctacttctgcctggctgccaatgaccaaaacaatgttaccatcatggctaacctgaaggttaaagatgcaactcagatcactcaggggccccgcagcacaatcgagaagaaaggttccagggtgaccttcacgtgccaggcctcctttgacccctccttgcagcccagcatcacctggcgtggggacggtcgagacctccaggagcttggggacagtgacaagtacttcatagaggatgggcgcctggtcatccacagcctggactacagcgaccagggcaactacagctgcgtggccagtaccgaactggatgtggtggagagtagggcacagctcttggtggtggggagccctgggccggtgccacggctggtgctgtccgacctgcacctgctgacgcagagccaggtgcgcgtgtcctggagtcctgcagaagaccacaatgcccccattgagaaatatgacattgaatttgaggacaaggaaatggcgcctgaaaaatggtacagtctgggcaaggttccagggaaccagacctctaccaccctcaagctgtcgccctatgtccactacacctttagggttactgccataaacaaatatggccccggggagcccagcccggtctctgagactgtggtcacacctgaggcagccccagagaagaaccctgtggatgtgaagggggaaggaaatgagaccaccaatatggtcatcacgtggaagccgctccggtggatggactggaacgccccccaggttcagtaccgcgtgcagtggcgccctcaggggacacgagggccctggcaggagcagattgtcagcgaccccttcctggtggtgtccaacacgtccaccttcgtgccctatgagatcaaagtccaggccgtcaacagccagggcaagggaccagagccccaggtcactatcggctactctggagaggactacccccaggcaatccctgagctggaaggcattgaaatcctcaactcaagtgccgtgctggtcaagtggcggccggtggacctggcccaggtcaagggccacctccgcggatacaatgtgacgtactggagggagggcagtcagaggaagcacagcaagagacatatccacaaagaccatgtggtggtgcccgccaacaccaccagtgtcatcctcagtggcttgcggccctatagctcctaccacctggaggtgcaggcctttaacgggcgaggatcggggcccgccagcgagttcaccttcagcaccccagagggagtgcctggccaccccgaggcgttgcacctggagtgccagtcgaacaccagcctgctgctgcgctggcagcccccactcagccacaacggcgtgctcaccggctacgtgctctcctaccaccccctggatgaggggggcaaggggcaactgtccttcaaccttcgggaccccgaacttcggacacacaacctgaccgatctcagcccccacctgcggtaccgcttccagcttcaggccaccaccaaagagggccctggtgaagccatcgtacgggaaggaggcactatggccttgtctgggatctcagattttggcaacatctcagccacagcgggtgaaaactacagtgtcgtctcctgggtccccaaggagggccagtgcaacttcaggttccatatcttgttcaaagccttgggagaagagaagggtggggcttccctttcgccacagtatgtcagctacaaccagagctcctacacgcagtgggacctgcagcctgacactgactacgagatccacttgtttaaggagaggatgttccggcaccaaatggctgtgaagaccaatggcacaggccgcgtgaggctccctcctgctggcttcgccactgagggctggttcatcggctttgtgagtgccatcatcctcctgctcctcgtcctgctcatcctctgcttcatcaagcgcagcaagggcggcaaatactcagtgaaggataaggaggacacccaggtggactctgaggcccgaccgatgaaagatgagaccttcggcgagtacaggtccctggagagtgacaacgaggagaaggcctttggcagcagccagccatcgctcaacggggacatcaagcccctgggcagtgacgacagcctggccgattatgggggcagcgtggatgttcagttcaacgaggatggttcgttcattggccagtacagtggcaagaaggagaaggaggcggcagggggcaatgacagctcaggggccacttcccccatcaaccctgccgtggccctagaatag

SEQ ID NO: 174 - DNA, 2814 bp, Homo sapiens
caaatcaaaagtcagggttgcagaatcagccggactttcctgctcatttgcagcagagggaggaagcagagaatgaaagattctgaaaataaaggtgcctcatctccagacatggagcccagctatgggggaggtctctttgacatggtaaaaggaggtgcagggaggctctttagtaacctaaaggacaacttgaaagacaccctcaaagacacatcttctagagtgatacaatctgtgaccagctacacaaagggagatttagacttcacttatgttacctccagaattattgtgatgtcctttcctctggacaatgttgacataggattcaggaatcaggttgatgacattcgaagctttttggattccagacatcttgaccactacacagtatacaatctgtcacctaagtcttatcgaactgccaagtttcacagccgggtctcagaatgcagttggcccattaggcaggctcccagtctgcacaacctttttgctgtgtgtcggaatatgtataactggctactgcagaatcccaaaaatgtctgtgttgtccactgcttggatggacgggcggcatcatcaattctggttggtgctatgttcattttctgtaatctctactctactcctggcccagccattcgattgctatatgcaaagcgaccaggaattggactttcaccatcccataggagatacctgggctatatgtgtgacctactggcagacaagccctaccgccctcacttcaagcctctcacaattaagtcgatcactgtcagtccaataccctttttcaacaaacagaggaatggatgtcgcccttactgtgatgtactcattggagaaaccaaaatatattcgacttgcacagattttgaacgaatgaaagaatatcgtgtccaagatggaaaaatcttcattcccttgaacatcactgtgcaaggagacgtggttgtttccatgtatcacttgaggtcaaccattgggagccggctacaggctaaggtgaccaacacacagatattccagcttcagtttcacactggattcataccactggacacaacagttttaaagttcaccaagcctgagttagatgcatgtgatgtaccagaaaaatatcctcagctatttcaggtgacactggatgtagaactacagccccatgacaaagtaatagacttaactccaccatgggaacattactgcacaaaagatgtcaatcccagcatcctcttctcttctcaccaggaacatcaagatacgctggccttaggaggacaggctccaatagatatccctccagacaaccccaggcattacggacaaagtggtttctttgcctctctctgttggcaagatcagaaatcggagaagtcattctgtgaggaggaccacgctgccctagtgaatcaggaaagtgagcaatcagatgatgaacttctgacactttccagtccgcatggcaatgccaatggtgacaagcctcatggagtcaagaagcccagcaaaaagcagcaggagccagcagcccctccaccccctgaggatgtggaccttttgggcctggaagggtctgcaatgagtaacagcttctctccgccagcggctcctcccaccaattctgaactactgagtgacctgtttgggggtggaggtgcagctggtcccacccaggctggacagtcaggagtggaagatgtgtttcatcctagtggacctgcgtctacccagtcaacaccacgccgctctgccacctccacctctgcgtctccaaccctaagagtgggagaaggtgccacctttgacccatttggagcaccttctaaaccatcaggtcaggatttgctgggttcttttctgaacacatccagtgcttccagtgacccctttctccagccaacaagaagtccttcgcccacagtacatgcttctagtacgcctgctgtgaacattcagccagatgtttctggaggttgggactggcatgctaaaccaggaggctttggaatgggaagcaagtcagctgccaccagcccaaccggatcctcgcatggtactcccacccatcaaagcaaaccccagactctggatccttttgccgaccttgggacactaggtagttcttcctttgccagcaaacccaccacaccaactggattgggtggaggattcccgcctctcagctcgccacagaaggcgtctccccagcctatgggtggcgggtggcagcagggaggtgcctacaactggcagcagccacagcctaagcctcagcccagcatgccccactcctctccccagaaccgacccaactacaacgtgagcttctcagccatgcctgggggccagaacgaacgtgggaaaggatcaagtaatttggaagggaaacaaaaagcagctgattttgaagacctactctctggtcaaggtttcaatgctcacaaagacaaaaaggggcctcggacaatagctgagatgagaaaggaggaaatggccaaggaaatggatcctgagaaattaaagattctggaatggattgaaggcaaagaaagaaatatcagagcccttctttccacgatgcataccgtactatgggctggggagaccaagtggaaaccagttggcatggcagacctggtaacaccagagcaggtgaagaaggtgtacaggaaggctgtcctggtggtgcacccagataaagctactgggcaaccctatgaacaatacgcaaagatgattttcatggagctcaatgatgcctggtctgaatttgaaaaccaaggccaaaagcccttatattaa

SEQ ID NO: 175 - DNA, 1071 bp, Homo sapiens
atggggctcctcaggattatgatgccgcccaagttgcagctgctggcggtggtggccttcgcggtggcgatgctcttcttggaaaaccagatccagaaactggaggagtcccgctcgaagctagaaagggctattgcaagacacgaagtccgagaaattgagcagcgacatacaatggatggccctcggcaagatgccactttagatgaggaagaggacatggtgatcatttataacagagttcccaaaacggcaagcacttcatttaccaatatcgcctatgacctgtgtgcaaagaataaataccatgtccttcatatcaacactaccaaaaataatccagtgatgtcattgcaagatcaggtgcgctttgtaaagaatataacttcctggaaagagatgaaaccaggattttatcatggacacgtttcttacttggattttgcaaaatttggtgtgaagaagaaaccaatttacattaatgtcataagggatcctattgagaggctagtttcttattattactttctgagatttggagatgattatagaccagggttacggagacgaaaacaaggagacaaaaagacctttgatgaatgtgtagcagaaggtggctcagactgtgctccagagaagctctggcttcaaatcccgttcttctgtggccatagctccgaatgctggaatgtgggaagcaggtgggctatggatcaagccaagtataacctaattaatgaatattttctggtgggagttactgaagaacttgaagattttatcatgttattggaggcagcattgccccggtttttcaggggtgctactgaactctatcgcacaggaaagaaatctcatcttaggaaaaccacagagaagaaactccccactaaacaaaccattgcaaaactacagcaatctgatatttggaaaatggagaatgagttctatgaatttgcactagagcagttccaattcatcagagcccatgccgttcgagaaaaagatggagacctctacatcctcgcacaaaactttttctatgaaaagatttaccctaagtcgaactga

SEQ ID NO: 176 - DNA, 990 bp, Homo sapiens
atgacccacttcaacaagggcccttcctatgggctctcggccgaagtcaagaacaagattgcttccaagtatgatcatcaggcagaagaagatcttcgcaattggatagaagaggtgacaggcatgagcattggccccaacttccagctgggcttaaaggatggcatcatcctctgcgaacttataaacaagctacagccaggctcagtgaagaaggtcaacgagtcctcactgaactggcctcagttggagaatattggcaactttattaaagctattcaggcttatggtatgaagccacatgacatattcgaagcaaatgatctttttgagaatggaaacatgacccaggttcagactactctggtggctctagcaggtctggctaaaacaaaaggattccatacaaccattgacattggagttaagtatgcagaaaaacaaacaagacgttttgatgaaggaaaattaaaagctggccaaagtgtaattggtctgcagatgggaaccaacaaatgtgccagccaggcaggtatgacagcttacgggactaggaggcatctttatgatcccaaaatgcaaactgacaaaccttttgaccagaccacaattagtctgcagatgggcactaataaaggagccagccaggcagggatgttagcaccaggtaccagaagagacatctatgatcagaagctaacattacagccggtggacaactcgacaatttccctacagatgggtaccaacaaagttgcttcccagaaaggaatgagtgtgtatgggcttgggcggcaagtatatgatcccaaatactgtgctgctcctacagaacctgtcattcacaacggaagccaaggaacaggaacaaatggttcggaaatcagtgatagtgattatcaggcagaataccctgatgagtatcatggcgagtaccaggatgactaccccagagattaccaatatagcgaccaaggcattgattattag

SEQ ID NO: 177 - DNA, 4140 bp, Homo sapiens
atggagactgggggccgggcccgcactggtaccccgcagccagcggccccgggggtgtggagggctcggccggcgggcggcggcggcgggggcgcctcctcctggctgctggacgggaacagctggctgctgtgctatggcttcctctacctggcgctctacgcgcaggtgtcccagtccaagccgtgcgagaggaccggctcctgcttctcgggccgctgtgtcaactccacctgcctctgcgacccgggctgggtgggggaccagtgccagcactgccagggcaggttcaagttaacagaaccttctggatatttaacagatggcccaattaactataaatataaaactaaatgtacttggctcattgaaggctatccaaatgcagtgttaagattaagattcaatcattttgctacagaatgtagctgggatcatatgtatgtttatgatggagattcaatatatgcacctttaatagctgtacttagtggtttgatagtccctgaaataaggggcaatgaaactgtgcctgaagttgttactacatctggctatgcactgttacatttttttagtgatgctgcgtataatctaactggtttcaacattttctattcaatcaattcttgtcctaacaattgctctggtcatgggaagtgtacaactagtgtctctgttccaagtcaagtatattgtgaatgtgataaatactggaagggtgaagcttgtgatattccttactgtaaagccaattgcggcagtccagatcacggttactgtgacctgactggagaaaaattatgtgtctgcaatgatagttggcaaggtcctgattgttctttgaatgttccctctactgagtcttactggattctgccaaacgttaaacccttcagtccttctgtaggtcgggcttcacataaagcagttttacacgggaaatttatgtgggtgattggtggatatacttttaactacagttcttttcaaatggtcctaaattacaatttagaaagcagtatatggaatgtaggaactccatcaaggggacctctccagagatatggacactctcttgctttatatcaggaaaacatctttatgtatggaggcagaattgaaacaaatgatggcaatgtcacagatgaattatgggtttttaacatacatagtcagtcatggagtacaaaaactcctactgttcttggacatggtcagcagtatgctgtggagggacattcagcacatattatggagttggatagtagagatgttgtcatgatcataatatttggatattctgcaatatatggttatacaagcagcatacaggaataccatatctcatcaaacacttggcttgttccagaaactaaaggagctattgtacaaggtggatatggccatactagtgtgtatgatgaaataacaaagtccatttatgttcatggagggtataaagcattgccagggaacaaatatggattggttgatgatctttataaatatgaagttaacactaagacttggactattttgaaagaaagtgggtttgccagataccttcattcagctgttcttatcaatggagctatgcttatttttggaggaaatacccataatgacacttccttgagtaacggtgcaaaatgtttttctgccgatttcctggcatatgacatagcttgtgatgaatggaaaatactaccaaaaccaaatcttcatagagatgtcaacagatttggacactctgcagtagtcattaacgggtccatgtatatatttgggggattttctagtgtactccttaatgatatccttgtatacaagcctccaaattgcaaggctttcagagatgaagaactttgtaaaaatgctggtccagggataaaatgtgtttggaataaaaatcactgtgaatcttgggaatctgggaatactaataatattcttagagcaaagtgccctcctaaaacagctgcttctgatgacagatgttacagatatgcagattgtgccagctgtactgccaatacaaatgggtgccaatggtgtgatgacaagaaatgcatttcggcaaatagtaactgcagtatgtctgtcaagaactacaccaaatgtcatgtgagaaatgagcagatttgtaacaaacttaccagctgtaaaagctgttcactaaacttgaattgccagtgggatcagagacagcaagaatgccaggctttaccagctcatctttgtggagaaggatggagtcatattggggatgcttgtcttagagtcaattccagtagagaaaactatgacaatgcaaaactttattgctataatcttagtggaaatcttgcttcattaacaacctcaaaagaagtagaatttgttctggatgaaatacagaagtatacacaacagaaagtatcaccttgggtaggcttgcgcaagatcaatatatcctattggggatgggaagacatgtctccttttacaaacacaacactacagtggcttcctggcgaacccaatgattctgggttttgtgcatatctggaaagggctgcagtggcaggcttaaaagctaatccttgtacatctatggcaaatggccttgtctgtgaaaaacctgttgttagtccaaatcaaaatgcgaggccgtgcaaaaagccatgctctctgaggacatcatgttccaactgtacaagcaatggcatggagtgtatgtggtgcagcagtacgaaacgatgtgttgactctaatgcctatatcatctcttttccatatggacaatgtctagagtggcaaactgccacctgctcccctcaaaattgttctggattgagaacctgtggacagtgtttggaacagcctggatgtggctggtgcaatgatcctagtaatacaggaagaggacattgcattgaaggttcttcacggggaccaatgaagcttattggaatgcaccacagtgagatggttcttgacaccaatctttgccccaaagaaaagaactatgagtggtcctttatccagtgtccagcttgccagtgtaatggacatagcacttgcatcaataataatgtgtgcgaacagtgtaaaaatctcaccacaggaaagcagtgtcaagattgtatgccaggttattatggagatccaaccaatggtggacagtgcacagcttgtacatgcagtggccatgcaaatatctgtcatctgcacacaggaaaatgtttctgcacaactaaaggaataaaaggtgaccaatgccaattatgtgactctgaaaatcgctatgttggtaatccacttagaggaacatgttattacagccttttgattgattatcaatttaccttcagcttattacaggaagatgatcgccaccatactgccataaactttatagcaaacccagaacagtcgaacaaaaatctggatatatcaattaatgcatcaaacaactttaatctcaacattacgtggtctgtcggttcaacagctggaacaatatctggggaagagacttctatagtttccaagaataatataaaggaatacagagatagtttttcctatgaaaaatttaactttagaagcaatcctaacattacattctatgtgtacgtcagcaacttttcctggcctattaaaatacagattgcattctcacaacacaatacaatcatggaccttgtgcagttttttgtcaccttcttcagttgtttcctatccttattgctggtggctgctgtggtatggaagatcaaacaaacttgttgggcttctcgacggagagagcaactgcttcgagaacgacagcagatggccagccgtccctttgcttctgttgatgtagctctggaagtgggagctgaacaaacagagtttctgcgagggccattagagggggcacccaagccaattgccattgaaccatgtgctgggaacagagctgctgttctgactgtgtttctttgtctaccacgaggatcatcaggtgcccctccccctgggcagtcaggccttgcaattgccagtgccctaatagatatttcacaacagaaagcttcagatagtaaagataagacttctggagtccggaatcgaaaacacctttcaacacgtcaaggaacttgtgtctga

SEQ ID NO: 178 - DNA, 3147 bp, Homo sapiens
atggtcctaaattacaatttagaaagcagtatatggaatgtaggaactccatcaaggggacctctccagagatatggacactctcttgctttatatcaggaaaacatctttatgtatggaggcagaattgaaacaaatgatggcaatgtcacagatgaattatgggtttttaacatacatagtcagtcatggagtacaaaaactcctactgttcttggacatggtcagcagtatgctgtggagggacattcagcacatattatggagttggatagtagagatgttgtcatgatcataatatttggatattctgcaatatatggttatacaagcagcatacaggaataccatatctcatcaaacacttggcttgttccagaaactaaaggagctattgtacaaggtggatatggccatactagtgtgtatgatgaaataacaaagtccatttatgttcatggagggtataaagcattgccagggaacaaatatggattggttgatgatctttataaatatgaagttaacactaagacttggactattttgaaagaaagtgggtttgccagataccttcattcagctgttcttatcaatggagctatgcttatttttggaggaaatacccataatgacacttccttgagtaacggtgcaaaatgtttttctgccgatttcctggcatatgacatagcttgtgatgaatggaaaatactaccaaaaccaaatcttcatagagatgtcaacagatttggacactctgcagtagtcattaacgggtccatgtatatatttgggggattttctagtgtactccttaatgatatccttgtatacaagcctccaaattgcaaggctttcagagatgaagaactttgtaaaaatgctggtccagggataaaatgtgtttggaataaaaatcactgtgaatcttgggaatctgggaatactaataatattcttagagcaaagtgccctcctaaaacagctgcttctgatgacagatgttacagatatgcagattgtgccagctgtactgccaatacaaatgggtgccaatggtgtgatgacaagaaatgcatttcggcaaatagtaactgcagtatgtctgtcaagaactacaccaaatgtcatgtgagaaatgagcagatttgtaacaaacttaccagctgtaaaagctgttcactaaacttgaattgccagtgggatcagagacagcaagaatgccaggctttaccagctcatctttgtggagaaggatggagtcatattggggatgcttgtcttagagtcaattccagtagagaaaactatgacaatgcaaaactttattgctataatcttagtggaaatcttgcttcattaacaacctcaaaagaagtagaatttgttctggatgaaatacagaagtatacacaacagaaagtatcaccttgggtaggcttgcgcaagatcaatatatcctattggggatgggaagacatgtctccttttacaaacacaacactacagtggcttcctggcgaacccaatgattctgggttttgtgcatatctggaaagggctgcagtggcaggcttaaaagctaatccttgtacatctatggcaaatggccttgtctgtgaaaaacctgttgttagtccaaatcaaaatgcgaggccgtgcaaaaagccatgctctctgaggacatcatgttccaactgtacaagcaatggcatggagtgtatgtggtgcagcagtacgaaacgatgtgttgactctaatgcctatatcatctcttttccatatggacaatgtctagagtggcaaactgccacctgctcccctcaaaattgttctggattgagaacctgtggacagtgtttggaacagcctggatgtggctggtgcaatgatcctagtaatacaggaagaggacattgcattgaaggttcttcacggggaccaatgaagcttattggaatgcaccacagtgagatggttcttgacaccaatctttgccccaaagaaaagaactatgagtggtcctttatccagtgtccagcttgccagtgtaatggacatagcacttgcatcaataataatgtgtgcgaacagtgtaaaaatctcaccacaggaaagcagtgtcaagattgtatgccaggttattatggagatccaaccaatggtggacagtgcacagcttgtacatgcagtggccatgcaaatatctgtcatctgcacacaggaaaatgtttctgcacaactaaaggaataaaaggtgaccaatgccaattatgtgactctgaaaatcgctatgttggtaatccacttagaggaacatgttattacagccttttgattgattatcaatttaccttcagcttattacaggaagatgatcgccaccatactgccataaactttatagcaaacccagaacagtcgaacaaaaatctggatatatcaattaatgcatcaaacaactttaatctcaacattacgtggtctgtcggttcaacagctggaacaatatctggggaagagacttctatagtttccaagaataatataaaggaatacagagatagtttttcctatgaaaaatttaactttagaagcaatcctaacattacattctatgtgtacgtcagcaacttttcctggcctattaaaatacagattgcattctcacaacacaatacaatcatggaccttgtgcagttttttgtcaccttcttcagttgtttcctatccttattgctggtggctgctgtggtatggaagatcaaacaaacttgttgggcttctcgacggagagagcaactgcttcgagaacgacagcagatggccagccgtccctttgcttctgttgatgtagctctggaagtgggagctgaacaaacagagtttctgcgagggccattagagggggcacccaagccaattgccattgaaccatgtgctgggaacagagctgctgttctgactgtgtttctttgtctaccacgaggatcatcaggtgcccctccccctgggcagtcaggccttgcaattgccagtgccctaatagatatttcacaacagaaagcttcagatagtaaagataagacttctggagtccggaatcgaaaacacctttcaacacgtcaaggaacttgtgtctga

SEQ ID NO: 179 - DNA, 1719 bp, Homo sapiens
atgtccttccagggcaagaaaagcatcccccggatcacgagtgaccgccttctgatcagaggtgggaggatcgtgaatgacgaccagtccttttacgctgatgtgcacgtggaagatggcttgataaaacaaatcggagaaaacctcatcgtccctgggggcatcaagaccattgacgcccacggcctgatggtccttcctggtggcgttgacgtccacacaaggctgcagatgcctgtcctgggcatgacaccggctgacgacttctgtcagggcaccaaggcagcgctagcaggaggaaccaccatgatcttggaccacgtcttccccgacacgggtgtgagcctgctggcggcctacgagcagtggcgggagcgggcggacagcgcggcctgctgcgactactccctgcacgtggacatcacccgatggcatgagagcatcaaggaggagctggaggccctggtcaaggagaagggtgtgaactccttcctggtcttcatggcatacaaggaccggtgccagtgcagcgacagccagatgtacgagatcttcagcatcatccgggacctgggggccttggcccaggtgcacgctgagaacggggacatcgtggaggaggagcagaagcggttgctggagctcggcatcactggccccgagggccacgtgctcagccaccccgaggaggtggaggctgaggcggtgtaccgagctgtcaccatcgccaagcaggcaaactgcccgctgtacgtcaccaaggtgatgagcaagggggcggccgacgccatcgctcaggccaagcgcagaggggtggtcgtgtttggggagcccatcaccgccagcctgggcaccgacggttcacactactggagcaagaactgggccaaggccgcagccttcgtcacatcaccccctgtcaacccagaccccaccacggcggaccacctcacctgcttgctgtccagcggggacctccaggtgacaggcagcgcccactgcaccttcaccactgcccagaaggctgtgggcaaggacaacttcgcgctgatccccgagggcaccaacggcattgaggagcgcatgtcgatggtctgggagaaatgtgtggcctctgggaagatggacgagaatgagttcgtcgcggtgaccagtacaaatgctgccaaaatcttcaatttttacccaaggaaggggcgagtggctgtgggctctgacgctgacctggtcatatggaaccccaaggccaccaagatcatctctgccaagacccacaatctgaacgtggagtacaacatcttcgagggagtggagtgccggggagcgcctgccgtggtcataagtcagggccgagtggcgctggaggacgggaagatgtttgtcaccccgggggcgggccgcttcgtccctcggaaaacattcccggactttgtctacaagaggatcaaagctcgcaacaggctggcggagatccacggtgtgccccgtggactgtatgacgggcccgtccacgaggtgatggtgcctgccaagccagggagtggcgctccggcccgcgcgtcctgcccaggcaagatctccgtccctcctgtgcgcaacctacatcagtcggggttcagcctatctgggtctcaggctgatgaccacatcgcccgacgcacagcacagaagatcatggcaccacctggcggccgctccaacatcacctctctctcctag

SEQ ID NO: 180 - DNA, 606 bp, Homo sapiens
atgcggctgctgcccctgctgcggactgtcctctgggccgcgttcctcggctcccctctgcgcgggggctccagcctccgccacgtagtctactggaactccagtaaccccaggttgcttcgaggagacgccgtggtggagctgggcctcaacgattacctagacattgtctgcccccactacgaaggcccagggccccctgagggccccgagacgtttgctttgtacatggtggactggccaggctatgagtcctgccaggcagagggcccccgggcctacaagcgctgggtgtgctccctgccctttggccatgttcaattctcagagaagattcagcgcttcacacccttctccctcggctttgagttcttacctggagagacttactactacatctcggtgcccactccagagagttctggccagtgcttgaggctccaggtgtctgtctgctgcaaggagaggaagtctgagtcagcccatcctgttgggagccctggagagagtggcacatcagggtggcgagggggggacactcccagccccctctgtctcttgctattactgctgcttctgattcttcgtcttctgcgaattctgtga

SEQ ID NO: 181 - DNA, 1230 bp, Homo sapiens
atgaagctaaagcagcgagtcgtgctgttagcaattctccttgtcatttttatcttcaccaaagttttcctgattgacaacttagatacatcagctgccaaccgggaggaccagagggcctttcaccgaatgatgactggcttgcgggtggagctggcacccaagctggaccataccttgcagtctccctgggagattgcagcccagtgggtggttccccgggaagtgtaccctgaagagacaccagagctgggggcagtcatgcatgccatggccaccaagaaaatcattaaagctgatgtgggttataaagggacacagctgaaagccttactgatacttgaaggaggccagaaagttgttttcaaacctaagcggtatagccgagaccatgtggtggaaggggaaccgtatgctggttatgatagacacaatgcagaggtagcagcctttcacttggacaggattctgggtttccaccgagcccccttggtagttggcagatttgttaatcttcggacagagatcaaacctgtcgccacagagcagctgttgagcaccttcctaactgtaggaaacaatacttgtttttatgggaagtgctattactgccgagaaacagaaccagcttgtgctgatggagacataatggagggatctgtcacactttggcttccagatgtgtggcctctgcagaagcaccgtcacccatggggcaggacttaccgagaaggcaaattggccaggtgggagtatgatgagagctactgtgatgctgtgaagaaaacgtccccttatgactctggcccgcgcctcttggacatcattgacacagctgtctttgattacctgattggcaatgctgaccgccatcactatgagagctttcaagatgatgaaggcgctagtatgctcatccttcttgataatgccaaaagctttgggaacccctcgctggatgaaagaagcattcttgcccctctctatcagtgttgcatcattcgggtgtccacctggaacagactgaactacctaaagaatggtgtgctaaagtctgccttaaaatctgccatggcccatgaccccatctccccagtgctctctgatcctcatctggacgccgtggaccagcggctcctgagtgtcctggccaccgtgaagcagtgcaccgaccagtttgggatggacacagtactggtggaagacaggatgcctctctcacacttgtaa

SEQ ID NO: 182 - DNA, 1152 bp, Homo sapiens
atgggtgtgaaggcgtctcaaacaggctttgtggtcctggtgctgctccagtgctgctctgcatacaaactggtctgctactacaccagctggtcccagtaccgggaaggcgatgggagctgcttcccagatgcccttgaccgcttcctctgtacccacatcatctacagctttgccaatataagcaacgatcacatcgacacctgggagtggaatgatgtgacgctctacggcatgctcaacacactcaagaacaggaaccccaacctgaagactctcttgtctgtcggaggatggaactttgggtctcaaagattttccaagatagcctccaacacccagagtcgccggactttcatcaagtcagtaccgccatttctgcgcacccatggctttgatgggctggaccttgcctggctctaccctggacggagagacaaacagcattttaccaccctaatcaaggaaatgaaggccgaatttataaaggaagcccagccagggaaaaagcagctcctgctcagcgcagcactgtctgcggggaaggtcaccattgacagcagctatgacattgccaagatatcccaacacctggatttcattagcatcatgacctacgattttcatggagcctggcgtgggaccacaggccatcacagtcccctgttccgaggtcaggaggatgcaagtcctgacagattcagcaacactgactatgctgtggggtacatgttgaggctgggggctcctgccagtaagctggtgatgggcatccccaccttcgggaggagcttcactctggcttcttctgagactggtgttggagccccaatctcaggaccgggaattccaggccggttcaccaaggaggcagggacccttgcctactatgagatctgtgacttcctccgcggagccacagtccatagaatcctcggccagcaggtcccctatgccaccaagggcaaccagtgggtaggatacgacgaccaggaaagcgtcaaaagcaaggtgcagtacctgaaggacaggcagctggcgggcgccatggtatgggccctggacctggatgacttccagggctccttctgtggccaggatctgcgcttccctctcaccaatgccatcaaggatgcactcgctgcaacgtag

SEQ ID NO: 183 - DNA, 1419 bp, Homo sapiens
atgaagtcgatcctagatggccttgcagataccaccttccgcaccatcaccactgacctcctgtacgtgggctcaaatgacattcagtacgaagacatcaaaggtgacatggcatccaaattagggtacttcccacagaaattccctttaacttcctttaggggaagtcccttccaagagaagatgactgcgggagacaacccccagctagtcccagcagaccaggtgaacattacagaattttacaacaagtctctctcgtccttcaaggagaatgaggagaacatccagtgtggggagaacttcatggacatagagtgtttcatggtcctgaaccccagccagcagctggccattgcagtcctgtccctcacgctgggcaccttcacggtcctggagaacctcctggtgctgtgcgtcatcctccactcccgcagcctccgctgcaggccttcctaccacttcatcggcagcctggcggtggcagacctcctggggagtgtcatttttgtctacagcttcattgacttccacgtgttccaccgcaaagatagccgcaacgtgtttctgttcaaactgggtggggtcacggcctccttcactgcctccgtgggcagcctgttcctcacagccatcgacaggtacatatccattcacaggcccctggcctataagaggattgtcaccaggcccaaggccgtggtggcgttttgcctgatgtggaccatagccattgtgatcgccgtgctgcctctcctgggctggaactgcgagaaactgcaatctgtttgctcagacattttcccacacattgatgaaacctacctgatgttctggatcggggtcaccagcgtactgcttctgttcatcgtgtatgcgtacatgtatattctctggaaggctcacagccacgccgtccgcatgattcagcgtggcacccagaagagcatcatcatccacacgtctgaggatgggaaggtacaggtgacccggccagaccaagcccgcatggacattaggttagccaagaccctggtcctgatcctggtggtgttgatcatctgctggggccctctgcttgcaatcatggtgtatgatgtctttgggaagatgaacaagctcattaagacggtgtttgcattctgcagtatgctctgcctgctgaactccaccgtgaaccccatcatctatgctctgaggagtaaggacctgcgacacgctttccggagcatgtttccctcttgtgaaggcactgcgcagcctctggataacagcatgggggactcggactgcctgcacaaacacgcaaacaatgcagccagtgttcacagggccgcagaaagctgcatcaagagcacggtcaagattgccaaggtaaccatgtctgtgtccacagacacgtctgccgaggctctgtga

SEQ ID NO: 184 - DNA, 1617 bp, Homo sapiens
atggcctcggaccccatcttcacgctggcgcccccgctgcattgccactacggggccttcccccctaatgcctctggctgggagcagcctcccaatgccagcggcgtcagcgtcgccagcgctgccctagcagccagcgccgccagccgtgtcgccaccagtaccgacccctcgtgcagcggcttcgccccgccggacttcaaccattgcctcaaggattgggactataatggccttcctgtgctcaccaccaacgccatcggccagtgggatctggtgtgtgacctgggctggcaggtgatcctggagcagatcctcttcatcttgggctttgcctccggctacctgttcctgggttaccccgcagacagatttggccgtcgcgggattgtgctgctgaccttggggctggtgggcccctgtggagtaggaggggctgctgcaggctcctccacaggcgtcatggccctccgattcctcttgggctttctgcttgccggtgttgacctgggtgtctacctgatgcgcctggagctgtgcgacccaacccagaggcttcgggtggccctggcaggggagttggtgggggtgggagggcacttcctgttcctgggcctggcccttgtctctaaggattggcgattcctacagcgaatgatcaccgctccctgcatcctcttcctgttttatggctggcctggtttgttcctggagtccgcacggtggctgatagtgaagcggcagattgaggaggctcagtctgtgctgaggatcctggctgagcgaaaccggccccatgggcagatgctgggggaggaggcccaggaggccctgcaggacctggagaatacctgccctctccctgcaacatcctccttttcctttgcttccctcctcaactaccgcaacatctggaaaaatctgcttatcctgggcttcaccaacttcattgcccatgccattcgccactgctaccagcctgtgggaggaggagggagcccatcggacttctacctgtgctctctgctggccagcggcaccgcagccctggcctgtgtcttcctgggggtcaccgtggaccgatttggccgccggggcatccttcttctctccatgacccttaccggcattgcttccctggtcctgctgggcctgtgggattgtgagcatcctatcttccccacagtgtgggctcaacaagggaaccccaacagagatctgaacgaggctgccatcaccactttctctgtccttgggctcttctcctcccaagctgccgccatcctcagcaccctccttgctgctgaggtcatccccaccactgtccggggccgtggcctgggcctgatcatggctctaggggcgcttggaggactgagcggcccggcccagcgcctccacatgggccatggagccttcctgcagcacgtggtgctggcggcctgcgccctcctctgcattctcagcattatgctgctgccggagaccaagcgcaagctcctgcccgaggtgctccgggacggggagctgtgtcgccggccttccctgctgcggcagccaccccctacccgctgtgaccacgtcccgctgcttgccacccccaaccctgccctctga

SEQ ID NO: 185 - DNA, 1524 bp, Homo sapiens
atgatggcggcagctcccatccagcagaacgggacccacactggggttcccatagacctggacccgccggactcgcggaaaaggccgctggaagccccccctgaagccggcagcaccaagaggaccaatacgggcgaagacggccagtattttctaaaggttctcatacctagttatgctgctggatctataattgggaagggaggacagacaattgttcagttgcaaaaagaaactggagccaccatcaagctgtctaagtccaaagatttttacccaggtactactgagcgagtgtgcttgatccagggaacggttgaagcactgaatgcagttcatggattcattgcagaaaaaattcgagaaatgccccaaaatgtggccaagacagaaccagtcagcattctacaaccccagaccaccgttaatccagatcgcatcaaacaaacattgccatcttccccaactaccaccaagtcctctccatctgatcccatgaccacctccagagctaatcaggtaaagattatagttcccaacagcacagcaggtctgataatagggaagggaggtgctactgtgaaggctgtaatggagcagtcaggggcttgggtgcagctttcccagaaacctgatgggatcaacttgcaagagagggttgtcactgtgagtggagaacctgaacaaaaccgaaaagctgttgaacttatcatccagaagatacaagaggatccacaaagtggcagctgtctcaatatcagttatgccaatgtgacaggtccagtggcaaattccaatccaaccggatctccttatgcaaacactgctgaagtgttaccaactgctgcagcagctgcagggctattaggacatgctaaccttgctggcgttgcagcctttccagcagttttatctggcttcacaggcaatgacctggtggccatcacctctgcacttaatacattagccagctatggatataatctcaacactttaggtttaggtctcagtcaagcagcagcaacaggggctttggctgcagcagctgccagtgccaacccagcagcagcagcagccaatttattggccacctatgccagtgaagcctcagccagtggcagcacagctggtggtacggcggggacatttgcattaggtagcctggctgctgctactgctgcaaccaatggatattttggagctgcttctcccctagctgccagtgccattctaggaacagaaaagtccacagatggatccaaggatgtagttgaaatagcagtgccagaaaacttagttggtgcaatacttggcaaaggagggaaaacattagtggaataccaggagttgactggtgcaaggatacagatctccaaaaaaggagaattcgtacctggcacaaggaatcggaaggtaaccattactggaacaccagctgcaacacaggctgctcaatatttaattacacaaaggatcacatatgagcaaggagttcgggctgccaatcctcagaaagtgggttga

SEQ ID NO: 186 - DNA, 1581 bp, Homo sapiens
atggcgccggagcggctgcggagccgggcgctctccgccttcaagttgcggggcttgctgctccgtggtgaagctattaagtacctcacagaagctcttcagtctatcagtgaattagagcttgaagataaactggaaaagataattaatgcagttgagaagcaacccttgtcatcaaacatgattgaacgatctgtggtggaagcagcagtccaggaatgcagtcagtctgttgatgaaactatagagcacgttttcaatatcataggagcatttgatattccacgctttgtgtacaattcagaaagaaaaaaatttcttcctctgttaatgaccaaccaccctgcaccaaatttatttggaacaccaagagataaagcagagatgtttcgtgagcgatataccattttgcaccagaggacccacaggcatgaattatttactcctccggtgataggttctcaccctgatgaaagcggaagcaaattccagcttaaaacaatagaaaccttattgggtagtacaaccaaaatcggagatgcgattgttcttggaatgataacgcagttaaaagagggaaaattttttctggaagatcctactggaacagtccaactagaccttagtaaagctcttcactttggtttatacacagaggcatgctttgtcttagcagaaggttggtttgaagatcaagtgtttcatgtcaatgcctttggatttccacccactgagccctctagtactactagggcatactatggaaatattaatttttttggaggtccttctaatacatctgtgaagacttctgcaaaactaaaacagctagaagaggagaataaagatgctatgtttgtgtttttatctgatgtttggttggaccaggtggaagtattggaaaaacttcgcataatgtttgctggttattcaccagcacctccaacctgctttattctgtgtggtaatttttcatctgcaccatatggaaaaaatcaagttcaagctttgaaagattccctaaaaactttggcagatataatatgtgaatacccagatattcaccaaagtagtcgttttgtgtttgtacctggtccagaggatcctggatttggttccatcttaccaaggccaccacttgctgaaagcatcactaatgaattcagacaaagggtaccattttcagtttttactactaatccttgcagaattcagtactgtacacaggaaattactgtcttccgtgaagacttagtaaataaaatgtgcagaaactgcgtccgttttcctagcagcaatttggctattcctaatcactttgtaaagactatcttatcccaaggacatctgactcccctacctctttatgtctgcccagtgtattgggcatatgactatgctttgagagtgtatcctgtgcccgatctacttgtcattgcagacaaatatgatcctttcactacgacaaataccgaatgcctctgcataaaccctggctcttttccaagaagtggattttcattcaaagttttttatccttctaataagacagtagaagatagcaaacttcaaggcttttga

SEQ ID NO: 187 - DNA, 3264 bp, Homo sapiens
atgaccgtggagcagaacgtgctgcagcagagcgcggcgcagaagcaccagcagacgtttttgaatcaactgagagaaattacggggattaatgacacccagatactacagcaagccttgaaggatagtaatggaaacttggaattagcagtggctttccttactgcgaagaatgctaagacccctcagcaggaggagacaacttactaccaaacagcacttcctggcaatgatagatacatcagtgtgggaagccaagcagatacaaatgtgattgatctcactggagatgataaagatgatcttcagagagcaattgccttgagtttggccgaatcaaacagggcattcagggagactggaataactgatgaggaacaagccattagcagagttcttgaagccagcatagcagagaataaagcatgtttgaagaggacacctacagaagtttggagggattctcgaaacccttatgatagaaaaagacaggacaaagctcccgttgggctaaagaatgttggcaatacttgttggtttagtgctgttattcagtcattatttaatcttttggaatttagaagattagttctgaattacaagcctccatcaaatgctcaagatttaccccgaaaccaaaaggaacatcggaatttgccttttatgcgtgagctgaggtatctatttgcacttcttgttggtaccaaaaggaagtatgttgatccatcaagagcagttgaaattcttaaggatgctttcaaatcaaatgactcacagcagcaagatgtgagtgagtttacacacaaattattagattggttagaagatgccttccaaatgaaagctgaagaggagacggatgaagagaagccaaagaaccccatggtagagttgttctatggcagattcctggctgtgggagtacttgaaggtaaaaaatttgaaaacactgaaatgtttggtcagtacccacttcaggtcaatgggttcaaagatctgcatgagtgcctagaagctgcaatgattgaaggagaaattgagtctttacattcagagaattcaggaaaatcaggccaagagcattggtttactgaattaccacctgtgttaacatttgaattgtcaagatttgaatttaatcaggcattgggaagaccagaaaaaattcacaacaaattagaatttccccaagttttatatttggacagatacatgcacagaaacagagaaataacaagaattaagagggaagagatcaagagactgaaagattacctcacggtattacaacaaaggctagaaagatatttaagctatggttccggtcccaaacgattccccttggtagatgttcttcagtatgcattggaatttgcctcaagtaaacctgtttgcacttctcctgttgacgatattgacgctagttccccacctagtggttccataccatcacagacattaccaagcacaacagaacaacagggagccctatcttcagaactgccaagcacatcaccttcatcagttgctgccatttcatcgagatcagtaatacacaaaccatttactcagtcccggatacctccagatttgcccatgcatccggcaccaaggcacataacggaggaagaactttctgtgctggaaagttgtttacatcgctggaggacagaaatagaaaatgacaccagagatttgcaggaaagcatatccagaatccatcgaacaattgaattaatgtactctgacaaatctatgatacaagttccttatcgattacatgccgttttagttcacgaaggccaagctaatgctgggcactactgggcatatatttttgatcatcgtgaaagcagatggatgaagtacaatgatattgctgtgacaaaatcatcatgggaagagctagtgagggactcttttggtggttatagaaatgccagtgcatactgtttaatgtacataaatgataaggcacagttcctaatacaagaggagtttaataaagaaactgggcagccccttgttggtatagaaacattaccaccggatttgagagattttgttgaggaagacaaccaacgatttgaaaaagaactagaagaatgggatgcacaacttgcccagaaagctttgcaggaaaagcttttagcgtctcagaaattgagagagtcagagacttctgtgacaacagcacaagcagcaggagacccagaatatctagagcagccatcaagaagtgatttctcaaagcacttgaaagaagaaactattcaaataattaccaaggcatcacatgagcatgaagataaaagtcctgaaacagttttgcagtcgatcatgatgacaccgaacatgcaaggtattatcatggcgataggtaaatccaggagtgtatatgacaggtgtggccctgaagcagggttctttaaggcaattaagttggaatatgcaaggttggttaagttggcccaagaagacaccccaccagaaaccgattatcgtttacatcatgtagtggtctactttatccagaaccaggcaccaaagaaaattattgagaaaacattactagaacaatttggagatagaaatttgagttttgatgaaaggtgtcacaacataatgaaagttgctcaagccaaactggaaatgataaaacctgaagaagtaaacttggaggaatatgaggagtggcatcaggattataggaaattcagggaaacaactatgtatctcataattgggctagaaaattttcaaagagaaagttatatagattccttgctgttcctcatctgtgcttatcagaataacaaagaactcttgtctaaaggcttatacagaggacatgatgaagaattgatatcacattatagaagagaatgtttgctaaaattaaatgagcaagccgcagaactcttcgaatctggagaggatcgagaagtaaacaatggtttgattatcatgaatgagtttattgtcccatttttgccattattactggtggatgaaatggaagaaaaggatatactagctgtagaagatatgagaaatcgatggtgttcctaccttggtcaagaaatggaaccacacctccaagaaaagctgacagattttttgccaaaactgcttgattgttctatggagattaaaagtttccatgagccaccgaagttaccttcatattccacgcatgaactctgtgagcgatttgcccgaatcatgttgtccctcagtcgaactcctgctgatggaagataa

SEQ ID NO: 188 - DNA, 1791 bp, Homo sapiens
atggagcccgagctggcggctcagaagcagcctcgaccgcggaggcgaagccgccgggcctctgggctcagcacggagggagcgacggggccttcggccgacacctccgggtcggagctggacgggagatgttcccttcggagaggcagctccttcacattcttaacacctggccccaactgggacttcactttgaaaagaaaacgcagagagaaagatgatgatgttgtaagccttagcagccttgatctgaaggagccaagcaataaaagagttcgacctctggctcgtgtcacgtccttggcaaatttaatctctcctgtaagaaatggagctgtcagacgttttggtcaaacaatacagtcatttacccttcgtggtgaccacagatccccagcctctgcccagaagttttctagcaggtcaacagtcccaacacccgccaagagaaggagcagtgcactgtggtcagagatgctggacatcaccatgaaggagtctctcaccaccagggagatcagacggcaggaggcaatatatgaaatgtcccgaggtgaacaggatttaattgaggatctcaaacttgcaagaaaggcctatcatgaccccatgttaaagttgtccatcatgtcagaagaggaactcacacatatatttggtgatctggactcttacatacctctgcatgaagatttgttgacaagaataggagaagcaaccaagcctgatggaacagtggagcagattggtcacattctcgtgagctggttaccgcgcttgaatgcctacagaggttactgtagtaaccagctggcagccaaagctcttcttgatcaaaagaaacaggatccaagagtccaagacttcctccagcgatgtctcgagtctcccttcagtcgaaaactagatctttggagtttcctagatatccctcgaagtcgcctagtcaaataccctttactgttaaaagaaattcttaaacacactccaaaagagcaccctgatgttcagcttctggaggatgctatattgataatacagggagtcctctctgatatcaacttgaagaaaggtgaatccgagtgccagtattacatcgacaagctggagtacctggatgaaaagcagagggaccccagaatcgaagcgagcaaagtgctgctgtgccatggggagctgcggagcaagagtggacataaactttacattttcctgtttcaagacatcttggttctgactcggcccgtcacacggaacgaacggcactcttaccaggtttaccggcagccaatcccagtccaagagctagtcctagaagacctgcaggatggagatgtgagaatgggaggctcctttcgaggagctttcagtaactcagagaaagctaaaaatatctttagaattcgcttccatgacccctctccagcccagtctcacactctgcaagccaatgacgtgttccacaagcagcagtggttcaactgtattcgagcggccattgcccccttccagtcggcaggcagtccacctgagctgcagggcctgccggagctgcacgaagagtgtgaggggaaccacccctctgcgaggaaactcacagcccagaggagggcatccacagtttccagtgttactcaggtagaagttgatgaaaacgcttacagatgtggctctggcatgcagatggcagaggacagcaagagcttaaagacacaccagacacagcccggcatccgaagagcgagggacaaagccctttctggtggcaaacggaaagagactttggtgtag

SEQ ID NO: 189 - DNA, 1233 bp, Homo sapiens
atggaaaccagcagcccgcggcccccgcggcccagctccaacccggggctgagcctggacgcccggctgggcgtggacactcgcctctgggccaaggtgctgttcaccgcgctctacgcactcatctgggcgctgggcgcggcgggcaatgcgctgtccgcgcacgtggtgctgaaggcgcgggccgggcgcgcggggcgcctgcgccaccacgtgctcagcctggcgctcgcgggcctgctgctgctgctggtcggcgtgccggtggagctctacagcttcgtgtggttccactacccctgggtcttcggcgacctgggctgccgcggctactacttcgtgcacgagctgtgcgcctacgccacggtgctgagcgtggcaggcctgagcgccgagcgctgcctagccgtgtgccagcccctgcgtgcccgcagcctgctgacgccacgccggacccggtggctggtggcgctctcgtgggccgcctcgctcggcctcgccctgcccatggccgtcatcatggggcagaagcacgaactcgagacggcggacggggagccggagcccgcctcgcgagtgtgcacggtgctggtgagccgcaccgcgctccaagtctttatccaggtgaatgtgctggtgtccttcgtgctccccttggcactaactgctttcctgaatggggtcacagtgagccacctgctggccctctgctcccaagtgccgtccacttctaccccgggcagctccacccccagccgcctggagctgctgagtgaggagggtctcctcagcttcatcgtatggaagaagacctttatccagggaggccaggtcagcctggtgagacataaagacgtgcgccggatccgcagcctccagcgcagcgtccaggttctcagagccatcgtggtcatgtatgtcatctgctggctgccgtaccatgcccgcaggctcatgtactgctacgtacctgatgacgcgtggactgacccactgtacaatttctaccactacttctacatggtgaccaacacacttttctacgtcagctcagctgtgactcctcttctctacaacgccgtgtcctcctccttcagaaaactcttcctggaagccgtcagctccctgtgtggagagcaccaccccatgaagcggttacccccgaagccccagagtcccaccctaatggatacagcttcaggctttggggatcccccagaaacccggacctga

SEQ ID NO: 190 - DNA, 1743 bp, Homo sapiens
atgcctggctggccctgggggctgctgctgacggcaggcacgctcttcgccgccctgagtcctgggccgccggcgcccgccgacccctgccacgatgaggggggtgcgccccgcggctgcgtgccaggactggtgaacgccgccctgggccgcgaggtgctggcttccagcacgtgcgggcggccggccactcgggcctgcgacgcctccgacccgcgacgggcacactcccccgccctccttacttccccagggggcacggccagccctctgtgctggcgctcggagtccctgcctcgggcgcccctcaacgtgactctcacggtgcccctgggcaaggcttttgagctggtcttcgtgagcctgcgcttctgctcagctcccccagcctccgtggccctgctcaagtctcaggaccatggccgcagctgggccccgctgggcttcttctcctcccactgtgacctggactatggccgtctgcctgcccctgccaatggcccagctggcccagggcctgaggccctgtgcttccccgcacccctggcccagcctgatggcagcggccttctggccttcagcatgcaggacagcagccccccaggcctggacctggacagcagcccagtgctccaagactgggtgaccgccaccgacgtccgtgtagtgctcacaaggcctagcacggcaggtgaccccagggacatggaggccgtcgtcccttactcctacgcagccaccgacctccaggtgggcgggcgctgcaagtgcaatggacatgcctcacggtgcctgctggacacacagggccacctgatctgcgactgtcggcatggcaccgagggccctgactgcggccgctgcaagcccttctactgcgacaggccatggcagcgggccactgcccgggaatcccacgcctgcctcgcttgctcctgcaacggccatgcccgccgctgccgcttcaacatggagctgtaccgactgtccggccgccgcagcgggggtgtctgtctcaactgccggcacaacaccgccggccgccactgccactactgccgggagggcttctatcgagaccctggccgtgccctgagtgaccgtcgggcttgcagggcctgcgactgtcacccggttggtgctgctggcaagacctgcaaccagaccacaggccagtgtccctgcaaggatggcgtcactggcctcacctgcaaccgctgcgcgcctggcttccagcaaagccgctccccagtggcgccctgtgttaagacccctatccctggacccactgaggacagcagccctgtgcagccccaggactgtgactcgcactgcaaacctgcccgtggcagctaccgcatcagcctaaagaagttctgcaagaaggactatgcggtgcaggtggcggtgggtgcgcgcggcgaggcgcgcggcgcgtggacacgcttcccggtggcggtgctcgccgtgttccggagcggagaggagcgcgcgcggcgcgggagtagcgcgctgtgggtgcccgccggggatgcggcctgcggctgcccgcgcctgctccccggccgccgctacctcctgctggggggcgggcctggagccgcggctgggggcgcggggggccgggggcccgggctcatcgccgcccgcggaagcctcgtgctaccctggagggacgcgtggacgcggcgcctgcggaggctgcagcgacgcgaacggcgggggcgctgcagcgccgcctga

SEQ ID NO: 191 - DNA, 2487 bp, Homo sapiens
atgaattcagaccaggatgtagcactcaaacttgcccaggagcgagctgaaatagttgctaaatatgacagaggacgagaaggtgcagagattgaaccttgggaagatgctgattaccttgtttacaaagtcacagatagatttggctttttacatgaggaggagctcccagatcataatgtggctgtggaacggcaaaagcacctggaaattgaaagaactaccaaatggctgaaaatgctgaaaggatgggaaaaatacaagaacactgaaaagtttcataggcgaatttacaaaggaataccactccagctcagaggtgaagtctgggccctccttcttgagatccctaaaatgaaagaagaaacaagggacctgtatagtaaattaaaacacagagcacggggctgttcacctgacatcagacaaatagacctggatgtcaaccgcacatttcgggaccacattatgtttagagacagatatggtgttaagcaacaatccttattccatgtgcttgctgcctattctatttataacacggaagtcgggtattgtcaggggatgagccagatcacagctttactcctcatgtatatgaacgaggaagatgccttctgggccctggtcaaactcttctcaggccctaaacatgccatgcatggcttttttgtccaaggttttcctaaactcttgaggtttcaagaacatcatgaaaaaatactgaacaaatttctgtccaagcttaagcaacacttggattctcaagaaatctacacaagtttttacacaatgaaatggttttttcagtgtttccttgatcgtactccctttacactaaacctcagaatatgggatatctacatctttgaaggagaacgagttcttactgctatgtcttacaccatcttaaaattacacaaaaaacatctaatgaaattgtccatggaagaacttgtagaattttttcaggagaccctggcaaaggattttttctttgaagatgattttgtgatagagcaacttcagatttctatgacagaactaaagcgggcaaagttagaccttccagaacctggtaaagaggatgaatatccaaagaagcccttggggcagcttccacctgaacttcagtcttggggcgtccatcacttgagcaacggacagaggagcgtgggccggccgagcccgctggccagcggcaggagggagagcggggcgccccacaggaggcacgagcactccccgcacccccagagcaggaccgggacgcccgagagagcacagccgccaagacggaaatcggtggaggaggagagcaaaaagcttaaagatgaggcagattttcaaagaaaactcccatcgggtccacaggacagttccaggcaatataatcacgcagctgccaaccaaaatagcaacgccacttcaaatatcaggaaggagtttgtgcccaaatggaataaaccgtcagacgtctcagctacagagagaactgccaaatacaccatggaaggcaaaggtcgagcagcgcaccccgcgctcgcagttaccgtcccaggtcctgccgaggtgcgggtgtcaaacgtgcggccaaagatgaaggccctggatgctgaggacgggaagcggggctccactgcatcgcagtacgacaacgtgccaggcccggagctggacagcggcgcttccgtggaggaggcgctggaaagggcttactcccagagcccccggcatgccctttaccctcctagcccgagaaagcacgctgagccaagttctagtccatcaaaagtatccaacaagtttacttttaaagtacagcctccaagtcatgcacgatatccgtcccagctagatggggaagcccgagggctagctcatcccccctcctacagcaatccccccgtttaccacggaaactctcccaaacacttccctactgccaacagcagctttgcttctccacagtttagccctgggactcaactgaatccttccaggagacctcatggttctactctttccgtcagtgcttctccggagaaatcttacagccgcccaagcccccttgtactgccgtctagtcgaatagaagtcctccctgttgacactggtgctgggggatattcgggcaattcagggtcaccaaagaatggaaaattgatcattccaccagtggattacttgccagataacagaacatggtcagaagttagttatacatacagacctgagacgcagggacaatcatggacccgagatgctagccgtggcaatttaccaaaatactcagcctttcaactcgcaccctttcaggaccatggcctccctgcagtttctgtagatagtcccgtgagatataaagcttcaccggccgcagaagatgccagtccatctggatatccatattcagggcccccgcctccagcctaccactacaggaatcgggacgggctttccatccaagagtcagtgttgctgtga

SEQ ID NO: 192 - DNA, 735 bp, Homo sapiens
atggcggcggcggcggctgcaggcgaggcgcgccgggtgctggtgtacggcggcaggggcgctctgggttctcgatgcgtgcaggcttttcgggcccgcaactggtgggttgccagcgttgatgtggtggagaatgaagaggccagcgctagcatcattgttaaaatgacagactcgttcactgagcaggctgaccaggtgactgctgaggttggaaagctcttgggtgaagagaaggtggatgcaattctttgcgttgctggaggatgggccgggggcaatgccaaatccaagtctctctttaagaactgtgacctgatgtggaagcagagcatatggacatcgaccatctccagccatctggctaccaagcatctcaaggaaggaggcctcctgaccttggctggcgcaaaggctgccctggatgggactcctggtatgatcgggtacggcatggccaagggtgctgttcaccagctctgccagagcctggctgggaagaacagcggcatgccgcccggggcagccgccatcgctgtgctcccggttaccctggataccccgatgaacaggaaatcaatgcctgaggctgacttcagctcctggacacccttagaattcctagttgaaactttccatgactggatcacagggaaaaaccgaccgagctcaggaagcctaatccaggtggtaaccacagaaggaaggacggaactcaccccagcatatttttag

SEQ ID NO: 193 - DNA, 846 bp, Homo sapiens
atggccgtcaatgtgtactccacatctgtgaccagtgaaaatctgagtcgccatgatatgcttgcatgggtcaacgactccctgcacctcaactataccaagatagaacagctttgttcaggggcagcctactgccagttcatggacatgctcttccccggctgtgtgcacttgaggaaagtgaagttccaggccaaactagagcacgaatacatccacaacttcaaggtgctgcaagcagctttcaagaagatgggtgttgacaaaatcattcctgtagagaaattagtgaaaggaaaattccaagataattttgagtttattcagtggtttaagaaattctttgacgcaaactatgatggaaaggattacaaccctctgctggcgcggcagggccaggacgtagcgccacctcctaacccaggtgatcagatcttcaacaaatccaagaaactcattggcacagcagttccacagaggacgtcccccacaggcccaaaaaacatgcagacctctggccggctgagcaatgtggcccccccctgcattctccggaagaatcctccatcagcccgaaatggcggccatgagactgatgcccaaattcttgaactcaaccaacagctggtggacttgaagctgacagtggatgggctggagaaggaacgtgacttctacttcagcaaacttcgtgacatcgagctcatctgccaggagcatgaaagtgaaaacagccctgttatctcaggcatcattggcatcctctatgccacagaggaaggattcgcaccccctgaggacgatgagattgaagagcatcaacaagaagaccaggacgagtactga

SEQ ID NO: 194 - DNA, 1908 bp, Homo sapiens
atgagtgtaggggtgagcacctcagcccctctttccccaacctcgggcacaagcgtgggcatgtctaccttctccatcatggactatgtggtgttcgtcctgctgctggttctctctcttgccattgggctctaccatgcttgtcgtggctggggccggcatactgttggtgagctgctgatggcggaccgcaaaatgggctgccttccggtggcactgtccctgctggccaccttccagtcagccgtggccatcctgggtgtgccgtcagagatctaccgatttgggacccaatattggttcctgggctgctgctactttctggggctgctgatacctgcacacatcttcatccccgttttctaccgcctgcatctcaccagtgcctatgagtacctggagcttcgattcaataaaactgtgcgagtgtgtggaactgtgaccttcatctttcagatggtgatctacatgggagttgtgctctatgctccgtcattggctctcaatgcagtgactggctttgatctgtggctgtccgtgctggccctgggcattgtctgtaccgtctatacagctctgggtgggctgaaggccgtcatctggacagatgtgttccagacactggtcatgttcctcgggcagctggcagttatcattgtggggtcagccaaggtgggcggcttggggcgtgtgtgggccgtggcttcccagcacggccgcatctctgggtttgagctggatccagacccctttgtgcggcacaccttctggaccttggccttcgggggtgtcttcatgatgctctccttatacggggtgaaccaggctcaggtgcagcggtacctcagttcccgcacggagaaggctgctgtgctctcctgttatgcagtgttccccttccagcaggtgtccctctgcgtgggctgcctcattggcctggtcatgttcgcgtattaccaggagtatcccatgagcattcagcaggctcaggcagccccagaccagttcgtcctgtactttgtgatggatctcctgaagggcctgccaggcctgccagggctcttcattgcctgcctcttcagcggctctctcagcactatatcctctgcttttaattcattggcaactgttacgatggaagacctgattcgaccttggttccctgagttctctgaagcccgggccatcatgctttccagaggccttgcctttggctatgggctgctttgtctaggaatggcctatatttcctcccagatgggacctgtgctgcaggcagcaatcagcatctttggcatggttgggggaccgctgctgggactcttctgccttggaatgttctttccatgtgctaaccctcctggtgctgttgtgggcctgttggctgggctcgtcatggccttctggattggcatcgggagcatcgtgaccagcatgggctccagcatgccaccctctccctctaatgggtccagcttctccctgcccaccaatctaaccgttgccactgtgaccacactgatgcccttgactaccttctccaagcccacagggctgcagcggttctattccttgtcttacttatggtacagtgctcacaactccaccacagtgattgtggtgggcctgattgtcagtctactcactgggagaatgcgaggccggtccctgaaccctgcaaccatttacccagtgttgccaaagctcctgtccctccttccgttgtcctgtcagaagcggctccactgcaggagctacggccaggaccacctcgacactggcctgtttcctgagaagccgaggaatggtgtgctgggggacagcagagacaaggaggccatggccctggatggcacagcctatcaggggagcagctccacctgcatcctccaggagacctccctgtga

SEQ ID NO: 195 - DNA, 1467 bp, Homo sapiens
atgtccactcccggggtcaattcgtccgcctccttgagccccgaccggctgaacagcccagtgaccatcccggcggtgatgttcatcttcggggtggtgggcaacctggtggccatcgtggtgctgtgcaagtcgcgcaaggagcagaaggagacgaccttctacacgctggtatgtgggctggctgtcaccgacctgttgggcactttgttggtgagcccggtgaccatcgccacgtacatgaagggccaatggcccgggggccagccgctgtgcgagtacagcaccttcattctgctcttcttcagcctgtccggcctcagcatcatctgcgccatgagtgtcgagcgctacctggccatcaaccatgcctatttctacagccactacgtggacaagcgattggcgggcctcacgctctttgcagtctatgcgtccaacgtgctcttttgcgcgctgcccaacatgggtctcggtagctcgcggctgcagtacccagacacctggtgcttcatcgactggaccaccaacgtgacggcgcacgccgcctactcctacatgtacgcgggcttcagctccttcctcattctcgccaccgtcctctgcaacgtgcttgtgtgcggcgcgctgctccgcatgcaccgccagttcatgcgccgcacctcgctgggcaccgagcagcaccacgcggccgcggccgcctcggttgcctcccggggccaccccgctgcctccccagccttgccgcgcctcagcgactttcggcgccgccggagcttccgccgcatcgcgggcgccgagatccagatggtcatcttactcattgccacctccctggtggtgctcatctgctccatcccgctcgtggtgcgagtattcgtcaaccagttatatcagccaagtttggagcgagaagtcagtaaaaatccagatttgcaggccatccgaattgcttctgtgaaccccatcctagacccctggatatatatcctcctgagaaagacagtgctcagtaaagcaatagagaagatcaaatgcctcttctgccgcattggcgggtcccgcagggagcgctccggacagcactgctcagacagtcaaaggacatcttctgccatgtcaggccactctcgctccttcatctcccgggagctgaaggagatcagcagtacatctcagaccctcctgccagacctctcactgccagacctcagtgaaaatggccttggaggcaggaatttgcttccaggtgtgcctggcatgggcctggcccaggaagacaccacctcactgaggactttgcgaatatcagagacctcagactcttcacagggtcaggactcagagagtgtcttactggtggatgaggctggtgggagcggcagggctgggcctgcccctaaggggagctccctgcaagtcacatttcccagtgaaacactgaacttatcagaaaaatgtatataa

SEQ ID NO: 196 - DNA, 2499 bp, Homo sapiens
atggagggcgacggcgggaccccatgggccctggcgctgctgcgcaccttcgacgcgggcgagttcacgggctgggagaaggtgggctcgggcggcttcgggcaggtgtacaaggtgcgccatgtccactggaagacctggctggccatcaagtgctcgcccagcctgcacgtcgacgacagggagcgcatggagcttttggaagaagccaagaagatggagatggccaagtttcgctacatcctgcctgtgtatggcatctgccgcgaacctgtcggcctggtcatggagtacatggagacgggctccctggaaaagctgctggcttcggagccattgccatgggatctccggttccgaatcatccacgagacggcggtgggcatgaacttcctgcactgcatggccccgccactcctgcacctggacctcaagcccgcgaacatcctgctggatgcccactaccacgtcaagatttctgattttggtctggccaagtgcaacgggctgtcccactcgcatgacctcagcatggatggcctgtttggcacaatcgcctacctccctccagagcgcatcagggagaagagccggctcttcgacaccaagcacgatgtatacagctttgcgatcgtcatctggggcgtgctcacacagaagaagccgtttgcagatgagaagaacatcctgcacatcatggtgaaggtggtgaagggccaccgccccgagctgccgcccgtgtgcagagcccggccgcgcgcctgcagccacctgatacgcctcatgcagcggtgctggcagggggatccgcgagttaggcccaccttccaaggaaacgggctgaatggggagctcatccgccaggtgctggcagctctgctccctgtgactggcaggtggcgctcccccggggaaggcttccgccttgagtctgaagtcatcatccgagtgacatgtcccctttcttccccacaagaaattacttctgaaaccgaggacctgtgtgaaaagcctgatgacgaagtgaaagaaactgctcatgatctggacgtgaaaagccccccggagcccaggagcgaggtggtgcctgcgaggctcaagcgggcctctgcccccaccttcgataacgactacagcctctccgagctgctctcacagctggactctggagtttcccaggctgtcgagggccccgaggagctcagccgcagctcctctgagtccaagctgccatcgtccggcagtgggaagaggctctcgggggtgtcctcggtggactccgccttctcttccagaggatcactgtcgctgtcctttgagcgggaaccttcaaccagcgatctgggcaccacagacgtccagaagaagaagcttgtggatgccatcgtgtccggggacaccagcaaactgatgaagatcctgcagccgcaggacgtggacctggcactggacagcggtgccagcctgctgcacctggcggtggaggccgggcaagaggagtgcgccaagtggctgctgctcaacaatgccaaccccaacctgagcaaccgtaggggctccaccccgttgcacatggccgtggagaggagggtgcggggtgtcgtggagctcctgctggcgcggaagatcagtgtcaacgccaaggatgaggaccagtggacagccctccactttgcagcccagaacggggacgagtctagcacacggctgctgttggagaagaacgcctcggtcaacgaggtggactttgagggccggacgcccatgcacgtggcctgccagcacgggcaggagaatatcgtgcgcatcctgctgcgccgaggcgtggacgtgagcctgcagggcaaggatgcctggctgccactgcactacgctgcctggcagggccacctgcccatcgtcaagctgctggccaagcagccgggggtgagtgtgaacgcccagacgctggatgggaggacgccattgcacctggccgcacagcgcgggcactaccgcgtggcccgcatcctcatcgacctgtgctccgacgtcaacgtctgcagcctgctggcacagacacccctgcacgtggccgcggagacggggcacacgagcactgccaggctgctcctgcatcggggcgctggcaaggaggccatgacctcagacggctacaccgctctgcacctggctgcccgcaacggacacctggccactgtcaagctgcttgtcgaggagaaggccgatgtgctggcccggggacccctgaaccagacggcgctgcacctggctgccgcccacgggcactcggaggtggtggaggagttggtcagcgccgatgtcattgacctgttcgacgagcaggggctcagcgcgctgcacctggccgcccagggccggcacgcacagacggtggagactctgctcaggcatggggcccacatcaacctgcagagcctcaagttccagggcggccatggccccgccgccacgctcctgcggcgaagcaagacctag

SEQ ID NO: 197 - DNA, 3075 bp, Homo sapiens
atgcccgcggcccggccgcccgccgcgggactccgcgggatctcgctgttcctcgctctgctcctggggagcccggcggcagcgctggagcgagatgctcttcccgagggagatgctagccctttgggtccttacctcctgccctcaggagccccggagagaggcagtcctggcaaagagcaccctgaagagagagtggtaacagcgccccccagttcctcacagtcggcggaagtgctgggcgagctggtgctggatgggaccgcaccctctgcacatcacgacatcccagccctgtcaccgctgcttccagaggaggcccgccccaagcacgccttgccccccaagaagaaactgccttcgctcaagcaggtgaactctgccaggaagcagctgaggcccaaggccacctccgcagccactgtccaaagggcagggtcccagccagcgtcccagggcctagatctcctctcctcctccacggagaagcctggcccaccgggggacccggaccccatcgtggcctccgaggaggcatcagaagtgcccctttggctggaccgaaaggagagtgcggtccctacaacacccgcacccctgcaaatctcccccttcacttcgcagccctatgtggcccacacactcccccagaggccagaacccggggagcctgggcctgacatggcccaggaggccccccaggaggacaccagccccatggccctgatggacaaaggtgagaatgagctgactgggtcagcctcagaggagagccaggagaccactacctccaccattatcaccaccacggtcatcaccaccgagcaggcaccagctctctgcagtgtgagcttctccaatcctgaggggtacattgactccagcgactacccactgctgcccctcaacaactttctggagtgcacatacaacgtgacagtctacactggctatggggtggagctccaggtgaagagtgtgaacctgtccgatggggaactgctctccatccgcggggtggacggccctaccctgaccgtcctggccaaccagacactcctggtggaggggcaggtaatccgaagccccaccaacaccatctccgtctacttccggaccttccaggacgacggccttgggaccttccagcttcactaccaggccttcatgctgagctgcaactttccccgccggcctgactctggggatgtcacggtgatggacctgcactcaggtggggtggcccactttcactgccacctgggctatgagctccagggcgctaagatgctgacatgcatcaatgcctccaagccgcactggagcagccaggagcccatctgctcagctccttgtggaggggcagtgcacaatgccaccatcggccgcgtcctctccccaagttaccctgaaaacacaaatgggagccaattctgcatctggacgattgaagctccagagggccagaagctgcacctgcactttgagaggctgttgctgcatgacaaggacaggatgacggttcacagcgggcagaccaacaagtcagctcttctctacgactcccttcaaaccgagagtgtcccttttgagggcctgctgagcgaaggcaacaccatccgcatcgagttcacgtccgaccaggcccgggcggcctccaccttcaacatccgatttgaagcgtttgagaaaggccactgctatgagccctacatccagaatgggaacttcactacatccgacccgacctataacattgggactatagtggagttcacctgcgaccccggccactccctggagcagggcccggccatcatcgaatgcatcaatgtgcgggacccatactggaatgacacagagcccctgtgcagagccatgtgtggtggggagctctctgctgtggctggggtggtattgtccccaaactggcccgagccctacgtggaaggtgaagattgtatctggaagatccacgtgggagaagagaaacggatcttcttagatatccagttcctgaatctgagcaacagtgacatcttgaccatctacgatggcgacgaggtcatgccccacatcttggggcagtaccttgggaacagtggcccccagaaactgtactcctccacgccagacttaaccatccagttccattcggaccctgctggcctcatctttggaaagggccagggatttatcatgaactacatagaggtatcaaggaatgactcctgctcggatttacccgagatccagaatggctggaaaaccacttctcacacggagttggtgcggggagccagaatcacctaccagtgtgaccccggctatgacatcgtggggagtgacaccctcacctgccagtgggacctcagctggagcagcgaccccccattttgtgagaaaattatgtactgcaccgaccccggagaggtggatcactcgacccgcttaatttcggatcctgtgctgctggtggggaccaccatccaatacacctgcaaccccggttttgtgcttgaagggagttctcttctgacctgctacagccgtgaaacagggactcccatctggacgtctcgcctgccccactgcgtttcggaggagtccctggcatgtgacaacccagggctgcctgaaaatggataccaaatcctgtacaagcgactctacctgccaggagagtccctcaccttcatgtgctacgaaggctttgagctcatgggtgaagtgaccatccgctgcatcctgggacagccatcccactggaacgggcccctgcccgtgtgtaaagttaatcaagacagttttgaacatgctttagaagtagcagaagcggcagcagagacgtcgctggaaggggggaacatggccctggctatcttcatcccggtcctcatcatctccttactgctgggaggagcctacatttacatcacaagatgtcgctactattccaacctccgcctgcctctgatgtactcccacccctacagccagatcaccgtggaaaccgagtttgacaaccccatttacgagacaggggaaaccagagagtatgaggtttctatctaa

SEQ ID NO: 198 - DNA, 1575 bp, Homo sapiens
atgcatgtggaaacggggccaaatggagaacaaattcggaaacacgctggacaaaagagaacttacaaagcaatttcagagagctatgccttcctaccaagagaagcggtgacacgatttctaatgagctgctcagagtgccagaaaagaatgcatttaaacccagatggaacagatcataaagataatggaaaacctcccactttggtgaccagcatgattgactacaacatgccaattaccatggcctacatgaaacacatgaagctgcagctgctaaactcacagcaagatgaggatgaaagttcaatagaaagtgatgaatttgacatgagtgattcaacacggatgtcagctgtgaactctgatcttagctccaatcttgaagaaagaatgcaaagtccccagaatcttcatggccagcaagatgatgattctgctgcagagagctttaatggcaatgagactctggggcacagttcaattgcttcagggggaacacacagcagggagatgggagactccaacagtgatggcaaaactgggctggagcaagatgaacagccactgaacctgagtgacagtcccctctctgcgcagctaacttcggaatacagaatagatgatcacaacagtaatgggaaaaacaagtataagaatcttctaatttctgacctcaagatggaacgagaggcgagagaaaatggaagcaagtctcctgcacatagttactccagctatgactctggcaaaaatgagagtgtagaccgaggagctgaggacctctcactaaacaggggagatgaggacgaagatgaccacgaggaccatgacgattcggagaaagttaatgagacagacggcgttgaagccgagcggctgaaagcttttaatatgtttgtcaggctgtttgtagatgaaaacttggaccgaatggtcccaatctctaagcagcccaaagaaaagatccaggctatcattgactcatgcaggcgacaattccctgagtatcaagagcgtgccagaaaacgtatacgtacttacctcaagtcctgcaggcggatgaaaagaagtggttttgagatgtctcgacctattccttcccaccttacttcagcagttgcagagagtatcttggcttcagcttgtgagagtgagagtagaaatgccgccaagaggatgcgtctggagagacagcaggatgagtctgctccagctgacaaacagtgtaaaccagaggcgacccaggccacttactcaacatcagctgttccaggctcacaggacgtgctgtacatcaatggaaatgggacctatagttaccatagttacagagggctaggagggggtctgctaaatctgaatgatgcttccagcagtggacccactgatctcagcatgaagagacaattggcgactagctcaggatcctccagcagctcaaactccagaccccagctgagtccaactgaaatcaatgccgtgagacagcttgttgcaggatatcgagaatcagctgcatttttattgcgatctgcagatgaactggaaaatctcattttacaacagaactga

SEQ ID NO: 199 - DNA, 1335 bp, Homo sapiens
atgattgaagacaataaggagaacaaagaccattccttagaaaggggaagagcaagtctcattttttccttaaagaatgaagttggaggacttataaaagccctgaaaatctttcaggagaagcatgtgaatctgttacatatcgagtcccgaaaatcaaaaagaagaaactcagaatttgagatttttgttgactgtgacatcaacagagaacaattgaatgatatttttcatctgctgaagtctcataccaatgttctctctgtgaatctaccagataattttactttgaaggaagatggtatggaaactgttccttggtttccaaagaagatttctgacctggaccattgtgccaacagagttctgatgtatggatctgaactagatgcagaccatcctggcttcaaagacaatgtctaccgtaaacgtcgaaagtattttgcggacttggctatgaactataaacatggagaccccattccaaaggttgaattcactgaagaggagattaagacctggggaaccgtattccaagagctcaacaaactctacccaacccatgcttgcagagagtatctcaaaaacttacctttgctttctaaatattgtggatatcgggaggataatatcccacaattggaagatgtctccaactttttaaaagagcgtacaggtttttccatccgtcctgtggctggttacttatcaccaagagatttcttatcaggtttagcctttcgagtttttcactgcactcaatatgtgagacacagttcagatcccttctataccccagagccagatacctgccatgaactcttaggtcatgtcccgcttttggctgaacctagttttgcccaattctcccaagaaattggcttggcttctcttggcgcttcagaggaggctgttcaaaaactggcaacgtgctactttttcactgtggagtttggtctatgtaaacaagatggacagctaagagtctttggtgctggcttactttcttctatcagtgaactcaaacatgcactttctggacatgccaaagtaaagccctttgatcccaagattacctgcaaacaggaatgtcttatcacaacttttcaagatgtctactttgtatctgaaagttttgaagatgcaaaggagaagatgagagaatttaccaaaacaattaagcgtccatttggagtgaagtataatccatatacacggagtattcagatcctgaaagacaccaagagcataaccagtgccatgaatgagctgcagcatgatctcgatgttgtcagtgatgcccttgctaaggtcagcaggaagccgagtatctaa

SEQ ID NO: 200 - DNA, 3063 bp, Homo sapiens
atgatgagcttcggcggcgcggacgcgctgctgggcgccccgttcgcgccgctgcatggcggcggcagcctccactacgcgctagcccgaaagggtggcgcaggcgggacgcgctccgccgctggctcctccagcggcttccactcgtggacacggacgtccgtgagctccgtgtccgcctcgcccagccgcttccgtggcgcaggcgccgcctcaagcaccgactcgctggacacgctgagcaacgggccggagggctgcatggtggcggtggccacctcacgcagtgagaaggagcagctgcaggcgctgaacgaccgcttcgccgggtacatcgacaaggtgcggcagctggaggcgcacaaccgcagcctggagggcgaggctgcggcgctgcggcagcagcaggcgggccgctccgctatgggcgagctgtacgagcgcgaggtccgcgagatgcgcggcgcggtgctgcgcctgggcgcggcgcgcggtcagctacgcctggagcaggagcacctgctcgaggacatcgcgcacgtgcgccagcgcctagacgacgaggcccggcagcgagaggaggccgaggcggcggcccgcgcgctggcgcgcttcgcgcaggaggccgaggcggcgcgcgtggacctgcagaagaaggcgcaggcgctgcaggaggagtgcggctacctgcggcgccaccaccaggaagaggtgggcgagctgctcggccagatccagggctccggcgccgcgcaggcgcagatgcaggccgagacgcgcgacgccctgaagtgcgacgtgacgtcggcgctgcgcgagattcgcgcgcagcttgaaggccacgcggtgcagagcacgctgcagtccgaggagtggttccgagtgaggctggaccgactgtcggaggcagccaaggtgaacacagacgctatgcgctcagcgcaggaggagataactgagtaccggcgtcagctgcaggccaggaccacagagctggaggcactgaaaagcaccaaggactcactggagaggcagcgctctgagctggaggaccgtcatcaggccgacattgcctcctaccaggaagccattcagcagctggacgctgagctgaggaacaccaagtgggagatggccgcccagctgcgagaataccaggacctgctcaatgtcaagatggctctggatatagagatagccgcttacagaaaactcctggaaggtgaagagtgtcggattggctttggcccaattcctttctcgcttccagaaggactccccaaaattccctctgtgtccactcacataaaggtgaaaagcgaagagaagatcaaagtggtggagaagtctgagaaagaaactgtgattgtggaggaacagacagaggagacccaagtgactgaagaagtgactgaagaagaggagaaagaggccaaagaggaggagggcaaggaggaagaagggggtgaagaagaggaggcagaagggggagaagaagaaacaaagtctcccccagcagaagaggctgcatccccagagaaggaagccaagtcaccagtaaaggaagaggcaaagtcaccggctgaggccaagtccccagagaaggaggaagcaaaatccccagccgaagtcaagtcccctgagaaggccaagtctccagcaaaggaagaggcaaagtcaccgcctgaggccaagtccccagagaaggaggaagcaaaatctccagctgaggtcaagtcccccgagaaggccaagtccccagcaaaggaagaggcaaagtcaccggctgaggccaagtctccagagaaggccaagtccccagtgaaggaagaagcaaagtcaccggctgaggccaagtccccagtgaaggaagaagcaaaatctccagctgaggtcaagtccccggaaaaggccaagtctccaacgaaggaggaagcaaagtcccctgagaaggccaagtccccagagaaggaagaggccaagtcccctgagaaggccaagtccccagtgaaggcagaagcaaagtcccctgagaaggccaagtccccagtgaaggcagaagcaaagtcccctgagaaggccaagtccccagtgaaggaagaagcaaagtcccctgagaaggccaagtccccagtgaaggaagaagcaaagtcccctgagaaggccaagtccccagtgaaggaagaagcaaagacccccgagaaggccaagtccccagtgaaggaagaagctaagtccccagagaaggccaagtccccagagaaggccaagactcttgatgtgaagtctccagaagccaagactccagcgaaggaggaagcaaggtcccctgcagacaaattccctgaaaaggccaaaagccctgtcaaggaggaggtcaagtccccagagaaggcgaaatctcccctgaaggaggatgccaaggcccctgagaaggagatcccaaaaaaggaagaggtgaagtccccagtgaaggaggaggagaagccccaggaggtgaaagtcaaagagcccccaaagaaggcagaggaagagaaagcccctgccacaccaaaaacagaggagaagaaggacagcaagaaagaggaggcacccaagaaggaggctccaaagcccaaggtggaggagaagaaggaacctgctgtcgaaaagcccaaagaatccaaagttgaagccaagaaggaagaggctgaagataagaaaaaagtccccaccccagagaaggaggctcctgccaaggtggaggtgaaggaagacgctaaacccaaagaaaagacagaggtagccaagaaggaaccagatgatgccaaggccaaggaacccagcaaaccagcagagaagaaggaggcagcaccggagaaaaaagacaccaaggaggagaaggccaagaagcctgaggagaaacccaagacagaggccaaagccaaggaagatgacaagaccctctcaaaagagcctagcaagcctaaggcagaaaaggctgaaaaatcctccagcacagaccaaaaagacagcaagcctccagagaaggccacagaagacaaggccgccaaggggaagtaa

SEQ ID NO: 201 - DNA, 1173 bp, Homo sapiens
atggcggtgtcggagagccagctcaagaaaatggtgtccaagtacaaatacagagacctaactgtacgtgaaactgtcaatgttattactctatacaaagatctcaaacctgttttggattcatatgtttttaacgatggcagttccagggaactaatgaacctcactggaacaatccctgtgccttatagaggtaatacatacaatattccaatatgcctatggctactggacacatacccatataatccccctatctgttttgttaagcctactagttcaatgactattaaaacaggaaagcatgttgatgcaaatgggaagatatatcttccttatctacatgaatggaaacacccacagtcagacttgttggggcttattcaggtcatgattgtggtatttggagatgaacctccagtcttctctcgtcctatttcggcatcctatccgccataccaggcaacggggccaccaaatacttcctacatgccaggcatgccaggtggaatctctccatacccatccggataccctcccaatcccagtggttacccaggctgtccttacccacctggtggtccatatcctgccacaacaagttctcagtacccttctcagcctcctgtgaccactgttggtcccagtagggatggcacaatcagcgaggacaccatccgagcctctctcatctctgcggtcagtgacaaactgagatggcggatgaaggaggaaatggatcgtgcccaggcagagctcaatgccttgaaacgaacagaagaagacctgaaaaagggtcaccagaaactggaagagatggttacccgtttagatcaagaagtagccgaggttgataaaaacatagaacttttgaaaaagaaggatgaagaactcagttctgctctggaaaaaatggaaaatcagtctgaaaacaatgatatcgatgaagttatcattcccacagctcccttatacaaacagatcctgaatctgtatgcagaagaaaacgctattgaagacactatcttttacttgggagaagccttgagaaggggcgtgatagacctggatgtcttcctgaagcatgtacgtcttctgtcccgtaaacagttccagctgagggcactaatgcaaaaagcaagaaagactgccggtctcagtgacctctactga

SEQ ID NO: 202 - DNA, 1278 bp, Homo sapiens
atggctccgatcaccaccagccgggaagaatttgatgaaatccccacagtggtggggatcttcagtgcatttggcctggtcttcacagtctctctctttgcatggatctgctgtcagagaaaatcatccaagtctaacaagactcctccatacaagtttgtgcatgtgcttaagggagttgatatttaccctgaaaacctaaatagcaaaaagaagtttggagcagatgataaaaatgaagtaaagaataagccagctgtgccaaagaattcattgcatctggatcttgaaaagagagatctcaatggcaattttcccaaaaccaacctcaaacctggcagtccttctgatctggagaatgcaaccccgaagctctttttagaaggggaaaaagagtcagtttcccctgagagtttaaagtccagcacttcccttacttcagaagagaaacaagagaagctgggaactctcttcttctccttagaatacaacttcgagagaaaagcatttgtggtcaatatcaaggaagcccgtggcttgccagccatggatgagcagtcgatgacctctgacccatatatcaaaatgacgatcctcccagagaagaagcataaagtgaaaactagagtgctgagaaaaaccttggatccagcttttgatgagacctttacattctatgggataccctacacccaaatccaagaattggccttgcacttcacaattttgagttttgacaggttttcaagagatgatatcattggggaagttctaattcctctctcgggaattgaattatctgaaggaaaaatgttaatgaatagagagatcatcaagagaaatgttaggaagtcttcaggacggggtgagttactgatctctctctgctatcagtccaccacaaacactctaactgtggttgtcttaaaagctcgacatctgcctaaatctgatgtgtccggactttcagatccctatgtcaaagtgaacctgtaccatgccaaaaagagaatctccaagaagaagactcatgtgaagaaatgcacccccaatgcagtgttcaatgagctgtttgtctttgatattccttgtgagggccttgaagatataagtgttgaatttttggttttggattctgaaagggggtcccgaaatgaggtaatcgggcagttagtcttgggtgcagcagcagaaggaactggtggagagcactggaaagagatctgtgactaccccaggagacaaattgccaagtggcacgtgctctgtgatggttag

SEQ ID NO: 203 - DNA, 831 bp, Homo sapiens
atggacagctcccgggaaccgactctggggcgcttggacgccgctggcttctggcaggtctggcagcgctttgatgcggatgaaaaaggttacatagaagagaaggaactcgatgctttctttctccacatgttgatgaaactgggtactgatgacacggtcatgaaagcaaatttgcacaaggtgaaacagcagtttatgactacccaagatgcctctaaagatggtcgcattcggatgaaagagcttgctggtatgttcttatctgaggatgaaaactttcttctgctctttcgccgggaaaacccactggacagcagcgtggagtttatgcagatttggcgcaaatatgacgctgacagcagtggctttatatcagctgctgagctccgcaacttcctccgagacctctttcttcaccacaaaaaggccatttctgaggctaaactggaagaatacactggcaccatgatgaagatttttgacagaaataaagatggtcggttggatctaaatgacttagcaaggattctggctcttcaggaaaacttccttctccaatttaaaatggatgcttgttctactgaagaaaggaaaagggactttgagaaaatctttgcctactatgatgttagtaaaacaggagccctggaaggcccagaagtggatgggtttgtcaaagacatgatggagcttgtccagcccagcatcagcggggtggaccttgataagttccgcgagattctcctgcgtcactgcgacgtgaacaaggatggaaaaattcagaagtctgagctggctttgtgtcttgggctgaaaatcaacccataa

SEQ ID NO: 204 - DNA, 4626 bp, Homo sapiens
atgagctccacactccactcggttttcttcaccctgaaggtcagcatcctgctggggtccctgctggggctctgcctgggccttgagttcatgggcctccccaaccagtgggcccgctacctccgctgggatgccagcacacgcagtgacctgagtttccagttcaagaccaacgtctctacggggctgctcctctacctggatgatggcggcgtctgcgacttcctatgcctctccctggtggatggccgcgttcagctccgcttcagcatggactgtgccgagactgccgtgctgtccaacaagcaggtgaatgacagcagctggcacttcctcatggtgagccgtgaccgcctgcgcacggtgctgatgcttgatggcgagggccagtctggggagctgcagccccagcggccctacatggatgtggtcagtgacttgttccttggtggagtccctactgacatacgaccttctgccctgacccttgatggagttcaggccatgcccggcttcaaggggttaattctggatctcaagtatggaaactcggagcctcggcttctggggagccggggtgtccagatggatgccgagggaccctgtggtgagcgtccctgtgaaaatggtgggatctgctttctcctggacggccaccccacctgtgactgttctaccactggctatggtggcaagctctgctcagaagcttcagtaacttgcccaggcctctcccacctcatgatgagtgaacaagctcgagaggagaatgtggccactttccgaggctcagagtatctgtgctacgacctgtctcagaacccgatccagagcagcagtgatgaaatcaccctctcctttaagacctggcagcgtaacggcctcatcctgcacacgggcaagtcggctgactatgtcaacctggctctgaaggatggtgcggtctccttggtcattaacctggggtccggggcctttgaggccattgtggagccagtgaatggaaaattcaacgacaacgcctggcatgatgtcaaagtgacacgcaacctccggcaggtgacaatctctgtggatggcattcttaccacgacgggctacactcaagaggactataccatgctgggctcggacgacttcttctatgtaggaggaagcccaagtaccgctgacttgcctggctcccctgtcagcaacaacttcatgggctgccttaaagaggttgtttataagaataatgacatccgtctggagctgtctcgcctggcccggattgcggacaccaagatgaaaatctatggcgaagttgtgtttaagtgtgagaatgtggccacactggaccccatcaactttgagaccccagaggcttacatcagcttgcccaagtggaacactaaacgtatgggctccatctcctttgacttccgcaccacagagcccaatggcctgatcctcttcactcatggaaagccccaagagaggaaggatgctcggagccagaagaatacaaaagtagacttctttgccgtggaactcctcgatggcaacctgtacttgctgcttgacatgggctctggcaccatcaaagtgaaagccactcagaagaaagccaatgatggggaatggtaccatgtggacattcagcgagatggcagatcaggtactatatcagtgaacagcaggcgcacgccattcaccgccagtggggagagcgagatcctggacctggaaggagacatgtacctgggagggctgccggagaaccgtgctggccttattctccccaccgagctgtggactgccatgctcaactatggctacgtgggctgcatccgcgacctattcattgatgggcgcagcaagaacattcgacagctggcagagatgcagaatgctgcgggtgtcaagtcctcctgttcacggatgagtgccaagcagtgtgacagctacccctgcaagaataatgctgtgtgcaaggacggctggaaccgcttcatctgcgactgcaccggcaccggatactggggaagaacctgcgaaagggaggcatccatcctgagctatgatggtagcatgtacatgaagatcatcatgcccatggtcatgcatactgaggcagaggatgtgtccttccgcttcatgtcccagcgagcttatgggctgctggtggctacgacctccagggactctgccgacaccctgcgtctggagctggatggggggcgtgtcaagctcatggttaacttagactgtatcaggataaactgtaactccagcaaaggaccagagaccttgtatgcagggcagaagctcaatgacaacgagtggcacaccgttcgggtggtgcggagaggaaaaagccttaagttaaccgtggatgatgatgtggctgagggtacaatggtgggagaccatacccgtttggagttccacaacattgaaacgggaatcatgactgagaaacgctacatctccgttgtcccctccagctttattggccatctgcagagcctcatgtttaatggccttctctacattgacttgtgcaaaaatggtgacattgattattgtgagctgaaggctcgttttggactgaggaacatcatcgctgaccctgtcacctttaagaccaagagcagctacctgagccttgccactcttcaggcttacacctccatgcacctcttcttccagttcaagaccacctcaccagatggcttcattctcttcaatagtggtgatggcaatgacttcattgcagtcgagcttgtcaaggggtatatacactacgtttttgacctcggaaacggtcccaatgtgatcaaaggcaacagtgaccgccccctgaatgacaaccagtggcacaatgtcgtcatcactcgggacaatagtaacactcatagcctgaaagtggacaccaaagtggtcactcaggttatcaatggtgccaaaaatctggatttgaaaggtgatctctatatggctggtctggcccaaggcatgtacagcaacctcccaaagctcgtggcctctcgagatggctttcagggctgtctagcatcagtggacttgaatggacgcctgccagacctcatcaatgatgctcttcatcggagcggacagatcgagcgtggctgtgaaggacccagtaccacctgccaggaagattcatgtgccaaccagggggtctgcatgcaacaatgggagggcttcacctgtgattgttctatgacctcttattctggaaaccagtgcaatgatcctggcgctacgtacatctttgggaaaagtggtgggcttatcctctacacctggccagccaatgacaggcccagcacgcggtctgaccgccttgccgtgggcttcagcaccactgtgaaggatggcatcttggtccgcatcgacagtgctccaggacttggtgacttcctccagcttcacatagaacaggggaaaattggagttgtcttcaacattggcacagttgacatctccatcaaagaggagagaacccctgtaaatgacggcaaataccatgtggtacgcttcaccaggaacggcggcaacgccaccctgcaggtggacaactggccagtgaatgaacattatcctacaggccggcagttaaccatcttcaacactcaggcgcaaatagccattggtggaaaggacaaaggacgcctcttccaaggccaactctctgggctctattatgatggtttgaaagtactgaacatggcggctgagaacaaccccaatattaaaatcaatggaagtgttcggctggttggagaagtcccatcaattttgggaacaacacagacgacctccatgccaccagaaatgtctactactgtcatggaaaccactactacaatggcgactaccacaacccgtaagaatcgctctacagccagcattcagccaacatcagatgatcttgtttcatctgctgaatgttcaagtgatgatgaagactttgttgaatgtgagccgagtacagataagagtctttccacttcaatcttcgaaggtggctacaaagcacatgcgcccaagtgggaatccaaggactttagacctaacaaagtctccgaaactagtaggactactaccacatctttatcccctgagctgatccgcttcacagcttcctcctcgtctgggatggtgcccaaattgccagctggcaaaatgaataaccgtgatctcaaaccccagcctgatatagtcttgcttccgttgcccactgcctatgagctagacagcaccaaactgaagagcccactaattacttcccccatgttccgtaatgtgcccacagcaaaccccacggagccgggaatcagacgggttccgggggcctcagaggtgatccgggagtcgagcagcacaacagggatggtcgtcggcattgtggctgctgccgccctctgcatcttgatcctcctgtacgccatgtacaagtacaggaacagggacgaggggtcctatcaagtggacgagacgcggaactacatcagcaactccgcccagagcaacggcacgctcatgaaggagaagcagcagagctcgaagagcggccacaagaaacagaaaaacaaggacagggagtattacgtgtaa

SEQ ID NO: 205 - DNA, 3228 bp, Homo sapiens
atgagggtcttcctgctttgtgcctacatactgctgctgatggtttcccagttgagggcagtcagctttcctgaagatgatgaaccccttaatactgtcgactatcactattcaaggcaatatccggtttttagaggacgcccttcaggcaatgaatcgcagcacaggctggactttcagctgatgttgaaaattcgagacacactttatattgctggcagggatcaagtttatacagtaaacttaaatgaaatgcccaaaacagaagtaatacccaacaagaaactgacatggcgatcaagacaacaggatcgagaaaactgtgctatgaaaggcaagcataaagatgaatgccacaactttatcaaagtatttgttccaagaaacgatgagatggtttttgtttgtggtaccaatgcattcaatcccatgtgtagatactacaggttgagtaccttagaatatgatggggaagaaattagtggcctggcaagatgcccatttgatgccagacaaaccaatgttgccctctttgctgatgggaagctgtattctgccacagtggctgacttcttggccagcgatgccgttatttatcgaagcatgggtgatggatctgcccttcgcacaataaaatatgattccaaatggataaaagagccacactttcttcatgccatagaatatggaaactatgtctatttcttctttcgagaaatcgctgtcgaacataataatttaggcaaggcaaatgctgtgtattcccgcgtggcccgcatatgtaaaaacgacatgggtggttcccagcgggtcctggagaaacactggacttcatttctaaaggctcggctgaactgttctgtccctggagattcgtttttctactttgatgttctgcagtctattacagacataatacaaatcaatggcatccccactgtggtcggggtgtttaccacgcagctcaatagcatccctggttctgctgtctgtgcatttagcatggatgacattgaaaaagtattcaaaggacggtttaaggaacagaaaactccagattctgtttggacagcagttcccgaagacaaagtgccaaagccaaggcctggctgttgtgcaaaacacggccttgccgaagcttataaaacctccatcgatttcccggatgaaactctgtcattcatcaaatctcatcccctgatggactctgccgttccacccattgccgatgagccctggttcacaaagactcgggtcaggtacagactgacggccatctcagtggaccattcagccggaccctaccagaactacacagtcatctttgttggctctgaagctggcatggtacttaaagttctggcaaagaccagtcctttctctttgaacgacagcgtattactggaagagattgaagcctacaaccatgcaaagtgcagtgctgagaatgaggaagacaaaaaggtcatctcattacagttggataaagatcaccacgctttatatgtggcgttctctagctgcattatccgcatccccctcagtcgctgtgagcgttatggatcatgtaaaaagtcttgtattgcatctcgtgacccgtattgtggctggttaagccagggatcctgtggtagagtgaccccagggatgcttgctgaaggatatgaacaagacacagaattcggcaacacagctcatctaggggactgccatgaaattttgcctacttcaactacaccagattacaaaatatttggcggtccaacatctgacatggaggtatcttcatcttctgttaccacaatggcaagtatcccagaaatcacacctaaagtgattgatacctggagacctaaactgacaagctctcggaaatttgtagttcaagatgatccaaacacttctgattttactgatcctttatcgggtatcccaaagggtgtacgatgggaagtccagtctggagagtccaaccagatggtccacatgaatgtcctcatcacctgtgtctttgctgcttttgttttgggggcattcattgcaggtgtggcagtatactgctatcgagacatgtttgttcggaaaaacagaaagatccataaagatgcagagtccgcccagtcatgcacagactccagtggaagttttgccaaactgaatggtctctttgacagccctgtcaaggaataccaacagaatattgattctcctaaactgtatagtaacctgctaaccagtcggaaagagctaccacccaatggagatactaaatccatggtaatggaccatcgagggcaacctccagagttggctgctcttcctactcctgagtctacacccgtgcttcaccagaagaccctgcaggccatgaagagccactcagaaaaggcccatggccatggagcttcaaggaaagaaacccctcagttttttccgtctagtccgccacctcattccccattaagtcatgggcatatccccagtgccattgttcttccaaatgctacccatgactacaacacgtctttctcaaactccaatgctcacaaagctgaaaagaagcttcaaaacattgatcaccctctcacaaagtcatccagtaagagagatcaccggcgttctgttgattccagaaataccctcaatgatctcctgaagcatctgaatgacccaaatagtaaccccaaagccatcatgggagacatccagatggcacaccagaacttaatgctggatcccatgggatcgatgtctgaggtcccacctaaagtccctaaccgggaggcatcgctatactcccctccttcaactctccccagaaatagcccaaccaagcgagtggatgtccccaccactcctggagtcccaatgacttctctggaaagacaaagaggttatcacaaaaattcctcccagaggcactctatatctgctatgcctaaaaacttaaactcaccaaatggtgttttgttatccagacagcctagtatgaaccgtggaggatatatgcccacccccactggggcgaaggtggactatattcagggaacaccagtgagtgttcatctgcagccttccctctccagacagagcagctacaccagtaatggcactcttcctaggacgggactaaagaggacgccgtccttaaaacctgacgtgccaccaaagccttcctttgttcctcaaaccccatctgtcagaccactgaacaaatacacatactag

SEQ ID NO: 206 - DNA, 498 bp, Homo sapiens
atggctcccaatgcttcctgcctctgtgtgcatgtccgttccgaggaatgggatttaatgacctttgatgccaacccatatgacagcgtgaaaaaaatcaaagaacatgtccggtctaagaccaaggttcctgtgcaggaccaggttcttttgctgggctccaagatcttaaagccacggagaagcctctcatcttatggcattgacaaagagaagaccatccaccttaccctgaaagtggtgaagcccagtgatgaggagctgcccttgtttcttgtggagtcaggtgatgaggcaaagaggcacctcctccaggtgcgaaggtccagctcagtggcacaagtgaaagcaatgatcgagactaagacgggtataatccctgagacccagattgtgacttgcaatggaaagagactggaagatgggaagatgatggcagattacggcatcagaaagggcaacttactcttcctggcatgttattgtattggagggtga

SEQ ID NO: 207 - DNA, 1407 bp, Homo sapiens
atggggttcctcgggaccggcacttggattctggtgttagtgctcccgattcaagctttccccaaacctggaggaagccaagacaaatctctacataatagagaattaagtgcagaaagacctttgaatgaacagattgctgaagcagaagaagacaagattaaaaaaacatatcctccagaaaacaagccaggtcagagcaactattcttttgttgataacttgaacctgctaaaggcaataacagaaaaggaaaaaattgagaaagaaagacaatctataagaagctccccacttgataataagttgaatgtggaagatgttgattcaaccaagaatcgaaaactgatcgatgattatgactctactaagagtggattggatcataaatttcaagatgatccagatggtcttcatcaactagacgggactcctttaaccgctgaagacattgtccataaaatcgctgccaggatttatgaagaaaatgacagagccgtgtttgacaagattgtttctaaactacttaatctcggccttatcacagaaagccaagcacatacactggaagatgaagtagcagaggttttacaaaaattaatctcaaaggaagccaacaattatgaggaggatcccaataagcccacaagctggactgagaatcaggctggaaaaataccagagaaagtgactccaatggcagcaattcaagatggtcttgctaagggagaaaacgatgaaacagtatctaacacattaaccttgacaaatggcttggaaaggagaactaaaacctacagtgaagacaactttgaggaactccaatatttcccaaatttctatgcgctactgaaaagtattgattcagaaaaagaagcaaaagagaaagaaacactgattactatcatgaaaacactgattgactttgtgaagatgatggtgaaatatggaacaatatctccagaagaaggtgtttcctaccttgaaaacttggatgaaatgattgctcttcagaccaaaaacaagctagaaaaaaatgctactgacaatataagcaagcttttcccagcaccatcagagaagagtcatgaagaaacagacagtaccaaggaagaagcagctaagatggaaaaggaatatggaagcttgaaggattccacaaaagatgataactccaacccaggaggaaagacagatgaacccaaaggaaaaacagaagcctatttggaagccatcagaaaaaatattgaatggttgaagaaacatgacaaaaagggaaataaagaagattatgacctttcaaagatgagagacttcatcaataaacaagctgatgcttatgtggagaaaggcatccttgacaaggaagaagccgaggccatcaagcgcatttatagcagcctgtaa

SEQ ID NO: 208 - DNA, 3240 bp, Homo sapiens
atggaggatgaagctgtcctggacagaggggcttccttcctcaagcatgtgtgtgatgaagaagaagtagaaggccaccataccatttacatcggagtccatgtgccgaagagttacaggagaaggagacgtcacaagagaaagacagggcacaaagaaaagaaggaaaaggagagaatctctgagaactactctgacaaatcagatattgaaaatgctgatgaatccagcagcagcatcctaaaacctctcatctctcctgctgcagaacgcatccgattcatcttgggagaggaggatgacagcccagctccccctcagctcttcacggaactggatgagctgctggccgtggatgggcaggagatggagtggaaggaaacagccaggtggatcaagtttgaagaaaaagtggaacagggtggggaaagatggagcaagccccatgtggccacattgtcccttcatagtttatttgagctgaggacatgtatggagaaaggatccatcatgcttgatcgggaggcttcttctctcccacagttggtggagatgattgttgaccatcagattgagacaggcctattgaaacctgaacttaaggataaggtgacctatactttgctccggaagcaccggcatcaaaccaagaaatccaaccttcggtccctggctgacattgggaagacagtctccagtgcaagtaggatgtttaccaaccctgataatggtagcccagccatgacccataggaatctgacttcctccagtctgaatgacatttctgataaaccggagaaggaccagctgaagaataagttcatgaaaaaattgccacgtgatgcagaagcttccaacgtgcttgttggggaggttgactttttggatactcctttcattgcctttgttaggctacagcaggctgtcatgctgggtgccctgactgaagttcctgtgcccacaaggttcttgttcattctcttaggtcctaaggggaaagccaagtcctaccacgagattggcagagccattgccaccctgatgtctgatgaggtgttccatgacattgcttataaagcaaaagacaggcacgacctgattgctggtattgatgagttcctagatgaagtcatcgtccttccacctggggaatgggatccagcaattaggatagagcctcctaagagtcttccatcctctgacaaaagaaagaatatgtactcaggtggagagaatgttcagatgaatggggatacgccccatgatggaggtcacggaggaggaggacatggggattgtgaagaattgcagcgaactggacggttctgtggtggactaattaaagacataaagaggaaagcgccattttttgccagtgatttttatgatgctttaaatattcaagctctttcggcaattctcttcatttatctggcaactgtaactaatgctatcacttttggaggactgcttggggatgccactgacaacatgcagggcgtgttggagagtttcctgggcactgctgtctctggagccatcttttgcctttttgctggtcaaccactcactattctgagcagcaccggacctgtcctagtttttgagaggcttctatttaatttcagcaaggacaataattttgactatttggagtttcgcctttggattggcctgtggtccgccttcctatgtctcattttggtagccactgatgccagcttcttggttcaatacttcacacgtttcacggaggagggcttttcctctctgattagcttcatctttatctatgatgctttcaagaagatgatcaagcttgcagattactaccccatcaactccaacttcaaagtgggctacaacactctcttttcctgtacctgtgtgccacctgacccagctaatatctcaatatctaatgacaccacactggccccagagtatttgccaactatgtcttctactgacatgtaccataatactacctttgactgggcatttttgtcgaagaaggagtgttcaaaatacggaggaaacctcgtcgggaacaactgtaattttgttcctgatatcacactcatgtcttttatcctcttcttgggaacctacacctcttccatggctctgaaaaaattcaaaactagtccttattttccaaccacagcaagaaaactgatcagtgattttgccattatcttgtccattctcatcttttgtgtaatagatgccctagtaggcgtggacaccccaaaactaattgtgccaagtgagttcaagccaacaagtccaaaccgaggttggttcgttccaccgtttggagaaaacccctggtgggtgtgccttgctgctgctatcccggctttgttggtcactatactgattttcatggaccaacaaattacagctgtgattgtaaacaggaaagaacataaactcaagaaaggagcagggtatcacttggatctcttttgggtggccatcctcatggttatatgctccctcatggctcttccgtggtatgtagctgctacggtcatctccattgctcacatcgacagtttgaagatggagacagagacttctgcacctggagaacaaccaaagtttctaggagtgagggaacaaagagtcactggaacccttgtgtttattctgactggtctgtcagtctttatggctcccatcttgaagtttatacccatgcctgtactctatggtgtgttcctgtatatgggagtagcatcccttaatggtgtgcagttcatggatcgtctgaagctgcttctgatgcctctgaagcatcagcctgacttcatctacctgcgtcatgttcctctgcgcagagtccacctgttcactttcctgcaggtgttgtgtctggccctgctttggatcctcaagtcaacggtggctgctatcatttttccagtaatgatcttggcacttgtagctgtcagaaaaggcatggactacctcttctcccagcacgacctcagcttcctggatgatgtcattccagaaaaggacaagaaaaagaaggaggatgagaagaaaaagaaaaagaagaagggaagtctggacagtgacaatgatgattctgactgcccatactcagaaaaagttccaagtattaaaattccaatggacatcatggaacagcaacctttcctaagcgatagcaaaccttctgacagagaaagatcaccaacattccttgaacgccacacatcatgctga

SEQ ID NO: 209 - DNA, 2193 bp, Homo sapiens
atgtctaagaactcagagttcatcaatctgtcatttttattagatcatgagaaggaaatgatcctgggcgtcctaaagagagatgaatatttgaaaaaagtggaggacaagagaataaggaagctgaaaaatgaactcttagaagcaaaacgtagaagtgggaaaactcaacaagaggccagcagagtttgtgttcactgtcacagaaacctgggcctaatctttgaccggggagacccttgtcaggcttgctcactgagggtatgcagggagtgtcgagttgcaggccccaatggcagctggaagtgcactgtctgtgacaaaatcgcgcagctaaggattataactggtgagtggttttttgaagaaaaggcaaaacgtttcaagcaagtcaatgttctcggcactgatgttgtccgacagtccattttaagaagaagtccaggagctgaagaagtacagagccaagagcaaacccgccaggatgcagaaaagtcagacacttcacctgttgctgggaagaaggccagccatgatgggcccaagagaaagggatttcttcttagcaagttcagatcggcaaccagaggagaaatcataactcccaaaactgacactgggcggagctatagcttggacttagacggtcaacattttcggagtttaaaatcacctcctggttcagacaggggaagcactggctcatcagatctcaatgaccaggaacctggtcctaggaccccgaagagcagtcggagcaatggtgtgaccccaggcactcagagttcaccagccccaagcacacgaactgtgacctcagtcatcagtagagagtatggttttgaaaattccatggatttggctgctattgaaggtacctctcaggagctcacaaagagtcaccgcagaaacacttctggcacaccttccatagcagtgtctggaacctctctctcctcagatcagagtcgatctgagttagatttgagtgagtcatttacagaagactcagaggatactgtaagcataagaagcaagtctgtccctggggctttagacaaggactccttggaagagactgaagaaagcattgatgccttagtgtcctcgcagttatctacaaacactcaccgtctggcaagtggcctatcaactaccagccttaacagcatgatgagcgtttacagtgaaacgggagactatggcaacgtgaaagtcagtggtgaaatccttctccatatcagctactgctacaaaactggtgggctgtacatttttgtcaagaattgcagaaatctggccataggagatgaaaagaaacagaggacagatgcttatgtcaagtcatatcttcttcctgacaagtcccggaacaacaagcgtaagaccaaaatcagaacaggcaccaatccagaattcaatgaaacactaaagtacactatcagccatacccagctggaaacaagaactctgcagctctcagtctggcactatgatcgatttggacgtaatagcttcctcggggaagtagagattccttttgactcatggaactttgaaaatccaactgatgagtggtttgtgcttcaacccaaggtggagtttgctcctgatattggccttcaatacaaaggagagctgacagttgttttacgttacattcccccagaagagaacctgatgcttccaccagaacaactccaaggaaataagacttttaaaaagggaaagaagaaggagtcacctgtaatctctggaggaatactagaagtgttcatcaaagaggcaaagaatttgacagcagtgaagtcaggaggcacttctgatagctttgtgaagggctacctgctccctgatgatagcaaagccaccaagcacaaaactctggtaataaaaaagagtgttaaccctcagtggaatcatacattcatgttcagtggcatccatccccaggatataaagaatgtttgcctagaacttactatctgggacaaggaggccttttccagcaacatctttctgggaggagttcgtttgaattctggaagtggtgtgagccatgggaagaacgtggattggatggactctcagggggaagagcagcgcctttggcagaagatggccaacaaccctggaactccctttgagggtgtactcatgcttcgttccagcatgggaaaatgtaggctctaa

SEQ ID NO: 210 - DNA, 2193 bp, Homo sapiens; identical to SEQ ID NO: 209

SEQ ID NO: 211 - DNA, 3354 bp, Homo sapiens
atgaagcgcagcctgaggaagatgtggcgccctggagaaaagaaggagccccagggcgttgtctatgaggatgtgccggacgacacggaggatttcaaggaatcgcttaaggtggtttttgaaggaagtgcatatggattacaaaactttaataagcaaaagaaattaaaaagatgtgacgatatggacaccttcttcttgcattatgctgcagcagaaggccaaattgagctaatggagaagatcaccagagattcctctttggaagtgctgcatgaaatggatgattatggaaatacccctctgcattgtgctgtagaaaaaaaccaaattgaaagcgttaagtttcttctcagcagaggagcaaacccaaatctccgaaacttcaacatgatggctcctctccacatagctgtgcagggcatgaataatgaggtgatgaaggtcttgcttgagcatagaactattgatgttaatttggaaggagaaaatggaaacacagctgtgatcattgcgtgcaccacaaataatagcgaagcattgcagattttgcttaaaaaaggagctaagccatgtaaatcaaataaatggggatgtttccctattcaccaagctgcattttcaggttccaaagaatgcatggaaataatactaaggtttggtgaagagcatgggtacagtagacagttgcacattaactttatgaataatgggaaagccacccctctccacctggctgtgcaaaatggtgacttggaaatgatcaaaatgtgcctggacaatggtgcacaaatagacccagtggagaagggaaggtgcacagccattcattttgctgccacccagggagccactgagattgttaaactgatgatatcgtcctattctggtagcgtggatattgttaacacaaccgatggatgtcatgagaccatgcttcactcattgtttgatcaccatgagctagcagactatttaatttcagtgggagcagatattaataagatcgattctgaaggacgctctccacttatattagcaactgcttctgcatcttggaatattgtaaatttgctactctctaaaggtgcccaagtagacataaaagataattttggacgtaattttctgcatttaactgtacagcaaccttatggattaaaaaatctgcgacctgaatttatgcagatgcaacagatcaaagagctggtaatggatgaagacaacgatgggtgtactcctctacattatgcatgtagacaggggggccctggttctgtaaataacctacttggctttaatgtgtccattcattccaaaagcaaagataagaaatcacctctgcattttgcagccagttatgggcgtatcaatacctgtcagaggctcctacaagacataagtgatacgaggcttctgaatgaaggtgaccttcatggaatgactcctctccatctggcagcaaagaatggacatgataaagtagttcagcttcttctgaaaaaaggtgcattgtttctcagtgaccacaatggctggacagctttgcatcatgcgtccatgggcgggtacactcagaccatgaaggtcattcttgatactaatttgaagtgcacagatcgcctggatgaagacgggaacactgcacttcactttgctgcaagggaaggccacgccaaagccgttgcgcttcttctgagccacaatgctgacatagtcctgaacaagcagcaggcctcctttttgcaccttgcacttcacaataagaggaaggaggttgttcttacgatcatcaggagcaaaagatgggatgaatgtcttaagattttcagtcataattctccaggcaataaatgtccaattacagaaatgatagaatacctccctgaatgcatgaaggtacttttagatttctgcatgttgcattccacagaagacaagtcctgccgagactattatatcgagtataatttcaaatatcttcaatgtccattagaattcaccaaaaaaacacctacacaggatgttatatatgaaccgcttacagccctcaacgcaatggtacaaaataaccgcatagagcttctcaatcatcctgtgtgtaaagaatatttactcatgaaatggttggcttatggatttagagctcatatgatgaatttaggatcttactgtcttggtctcatacctatgaccattctcgttgtcaatataaaaccaggaatggctttcaactcaactggcatcatcaatgaaactagtgatcattcagaaatactagataccacgaattcatatctaataaaaacttgtatgattttagtgtttttatcaagtatatttgggtattgcaaagaagcggggcaaattttccaacagaaaaggaattattttatggatataagcaatgttcttgaatggattatctacacgacgggcatcatttttgtgctgcccttgtttgttgaaataccagctcatctgcagtggcaatgtggagcaattgctgtttacttctattggatgaatttcttattgtatcttcaaagatttgaaaattgtggaatttttattgttatgttggaggtaattttgaaaactttgttgaggtctacagttgtatttatcttccttcttctggcttttggactcagcttttacatcctcctgaatttacaggatcccttcagctctccattgctttctataatccagaccttcagcatgatgctaggagatatcaattatcgagagtccttcctagaaccatatctgagaaatgaattggcacatccagttctgtcctttgcacaacttgtttccttcacaatatttgtcccaattgtcctcatgaatttacttattggtttggcagttggcgacattgctgaggtccagaaacatgcatcattgaagaggatagctatgcaggtggaacttcataccagcttagagaagaagctgccactttggtttctacgcaaagtggatcagaaatccaccatcgtgtatcccaacaaacccagatctggtgggatgttattccatatattctgttttttattttgcactggggaaataagacaagaaataccaaatgctgataaatctttagaaatggaaatattaaagcagaaataccggctgaaggatcttacttttctcctggaaaaacagcatgagctcattaaactgatcattcagaagatggagatcatctctgagacagaggatgatgatagccattgttcttttcaagacaggtttaagaaagagcagatggaacaaaggaatagcagatggaatactgtgttgagagcagtcaaggcaaaaacacaccatcttgagccttag

SEQ ID NO: 212 - DNA, 4944 bp, Homo sapiens
atggtgcaaaagaagaagttctgtcctcggttacttgactatctagtgatcgtaggggccaggcacccgagcagtgatagcgtggcccagactcctgaattgctacggcgataccccttggaggatcacactgagtttcccctgcccccagatgtagtgttcttctgccagcccgagggctgcctgagcgtgcggcagcggcgcatgagccttcgggatgatacctcttttgtcttcaccctcactgacaaggacactggagtcacgcgatatggcatctgtgttaacttctaccgctccttccaaaagcgaatctctaaggagaagggggaaggtggggcagggtcccgtgggaaggaaggaacccatgccacctgtgcctcagaagagggtggcactgagagctcagagagtggctcatccctgcagcctctcagtgctgactctacccctgatgtgaaccagtctcctcggggcaaacgccgggccaaggcggggagccgctcccgcaacagtactctcacgtccctgtgcgtgctcagccactaccctttcttctccaccttccgagagtgtttgtatactctcaagcgcctggtggactgctgtagtgagcgccttctgggcaagaaactgggcatccctcgaggcgtacaaagggacaccatgtggcggatctttactggatcgctgctggtagaggagaagtcaagtgcccttctgcatgaccttcgagagattgaggcctggatctatcgattgctgcgctccccagtacccgtctctgggcagaagcgagtagacatcgaggtcctaccccaagagctccagccagctctgacctttgctcttccagacccatctcgattcaccctagtggatttcccactgcaccttcccttggaacttctaggtgtggacgcctgtctccaggtgctaacctgcattctgttagagcacaaggtggtgctacagtcccgagactacaatgcactctccatgtctgtgatggcattcgtggcaatgatctacccactggagtatatgtttcctgtcatcccgctgctacccacctgcatggcatcagcagagcagctgctgttggctccaaccccgtacatcattggggttcctgccagcttcttcctctacaaactggacttcaaaatgcctgatgatgtatggctagtggatctggacagcaatagggtgattgcccccaccaatgcagaagtgctgcctatcctgccagaaccagaatcactagagctgaaaaagcatttaaagcaggccttggccagcatgagtctcaacacccagcccatcctcaatctggagaaatttcatgagggccaggagatcccccttctcttgggaaggccttctaatgacctgcagtccacaccgtccactgaattcaacccactcatctatggcaatgatgtggattctgtggatgttgcaaccagggttgccatggtacggttcttcaattccgccaacgtgctgcagggatttcagatgcacacgcgtaccctgcgcctctttcctcggcctgtggtagcttttcaagctggctcctttctagcctcacgtccccggcagactccttttgccgagaaattggccaggactcaggctgtggagtactttggggaatggatccttaaccccaccaactatgcctttcagcgaattcacaacaatatgtttgatccagccctgattggtgacaagccaaagtggtatgctcatcagctgcagcctatccactatcgcgtctatgacagcaattcccagctggctgaggccctgagtgtaccaccagagcgggactctgactccgaacctactgatgatagtggcagtgatagtatggattatgacgattcaagctcttcttactcctcccttggtgactttgtcagtgaaatgatgaaatgtgacattaatggtgatactcccaatgtggaccctctgacacatgcagcactgggggatgccagcgaggtggagattgacgagctgcagaatcagaaggaagcagaagagcctggcccagacagtgagaactctcaggaaaaccccccactgcgctccagctctagcaccacagccagcagcagccccagcactgtcatccacggagccaactctgaacctgctgactctacggagatggatgataaggcagcagtaggcgtctccaagcccctcccttccgtgcctcccagcattggcaaatcgaacgtggacagacgtcaggcagaaattggagaggggtcagtgcgccggcgaatctatgacaatccatacttcgagccccaatatggctttccccctgaggaagatgaggatgagcagggggaaagttacactccccgattcagccaacatgtcagtggcaatcgggctcaaaagctgctgcggcccaacagcttgagactggcaagtgactcagatgcagagtcagactctcgggcaagctctcccaactccaccgtctccaacaccagcaccgagggcttcgggggcatcatgtcttttgccagcagcctctatcggaaccacagtaccagcttcagtctttcaaacctcacactgcccaccaaaggtgcccgagagaaggccacgcccttccccagtctgaaagtatttgggctaaatactctaatggagattgttactgaagccggccccgggagtggtgaaggaaacaggagggcgttagtggatcagaagtcatctgtcattaaacacagcccaacagtgaaaagagaacctccatcaccccagggtcgatccagcaattctagtgagaaccagcagttcctgaaggaggtggtgcacagcgtgctggacggccagggagttggctggctcaacatgaaaaaggtgcgccggctgctggagagcgagcagctgcgagtctttgtcctgagcaagctgaaccgcatggtgcagtcagaggacgatgcccggcaggacatcatcccggatgtggagatcagtcggaaggtgtacaagggaatgttagacctcctcaagtgtacagtcctcagcttggagcagtcctatgcccacgcgggtctgggtggcatggccagcatctttgggcttttggagattgcccagacccactactatagtaaagaaccagacaagcggaagagaagtccaacagaaagtgtaaataccccagttggcaaggatcctggcctagctgggcggggggacccaaaggctatggcacaactgagagttccacaactgggacctcgggcaccaagtgccacaggaaagggtcctaaggaactggacaccagaagtttaaaggaagaaaattttatagcatctattgaattgtggaacaagcaccaggaagtgaaaaagcaaaaagctttggaaaaacagaggcctgaagtaatcaaacctgtctttgaccttggtgagacagaggagaaaaagtcccagatcagcgcagacagtggtgtgagcctgacgtctagttcccagaggactgatcaagactctgtcatcggcgtgagtccagctgttatgatccgcagctcaagtcaggattctgaagttagcaccgtggtgagtaatagctctggagagacccttggagctgacagtgacttgagcagcaatgcaggtgatggaccaggtggcgagggcagtgttcacctggcaagctctcggggcactttgtctgatagtgaaattgagaccaactctgccacaagcaccatctttggtaaagcccacagcttgaagccaagcataaaggagaagctggcaggcagccccattcgtacttctgaagatgtgagccagcgagtctatctctatgagggactcctaggaagggacaaaggatccatgtgggaccagttagaggatgcagctatggagaccttttctataagcaaagagcgttctactttatgggaccaaatgcaattctgggaagatgccttcttagatgctgtgatgttggagagagaagggatgggtatggaccagggtccccaggaaatgatcgacaggtacctgtcccttggagaacatgaccggaagcgcctggaagatgatgaagatcgcttgttggccacacttctgcacaacctcatctcctacatgctgctgatgaaggtaaataagaatgacatccgcaagaaggtgaggcgcctaatgggaaagtcgcacattgggcttgtgtacagccagcaaatcaatgaggtgcttgatcagctggcgaacctgaatggacgcgatctctctatctggtccagtggcagccggcacatgaagaagcagacatttgtggtacatgcagggacagatacaaacggagatatctttttcatggaggtgtgcgatgactgtgtggtgttgcgtagtaacatcggaacagtgtatgagcgctggtggtacgagaagctcatcaacatgacctactgtcccaagacgaaggtgttgtgcttgtggcgtagaaatggctctgagacccagctcaacaagttctatactaaaaagtgtcgggagctgtactactgtgtgaaggacagcatggagcgcgctgccgcccgacagcaaagcatcaaacccggacctgaattgggtggcgagttccctgtgcaggacctgaagactggtgagggtggcctgctgcaggtgaccctggaagggatcaacctcaaattcatgcacaatcaggttttcatagagctgaatcacattaaaaagtgcaatacagttcgaggcgtctttgtcctggaggaatttgttcctgaaattaaagaagtggtgagccacaagtacaagacaccaatggcccacgaaatctgctactccgtattatgtctcttctcgtacgtggctgcagttcatagcagtgaggaagatctcagaaccccgccccggcctgtctctagctga

SEQ ID NO: 213 - DNA, 1215 bp, Homo sapiens
atggccgcggttcccgagttgctgcagcagcaggaggaggaccgcagcaagctgagatctgtatctgtggacctgaatgttgatccctcgcttcagattgacatacctgatgcgctcagtgagagagacaaagtcaaatttacagtgcacacaaagaccacactgcccacgtttcagagcccagagttttctgttacaaggcaacatgaagactttgtgtggctacatgacactcttattgaaacaacagactatgctgggcttattattccacctgctcctacgaagcccgactttgatggtcctcgagagaagatgcagaaactgggagaaggtgaagggtctatgaccaaagaagaatttgccaagatgaaacaagaactggaagctgagtatctcgctgtgtttaagaagactgtgtcctcccatgaagtctttcttcagcggctttcttctcaccctgttctcagtaaagatcgcaactttcatgttttcctggaatatgatcaggatctaagtgttaggcggaaaaatactaaagagatgtttggtggcttcttcaaaagtgtggtgaaaagtgctgatgaagtcctttttactggagttaaggaggtagatgacttctttgagcaagagaagaacttccttattaactattacaataggatcaaagattcttgtgtgaaagctgacaaaatgaccagatctcataaaaatgttgccgatgactatatccacaccgcagcctgcttacatagcctggctttagaagagcccacagtcatcaaaaagtacctattgaaggttgctgagctatttgaaaaactaaggaaagtagagggtcgagtttcatcagatgaagatttgaagctaacagagctcctccgatactacatgctcaacattgaagctgctaaggatctcttatacagacgcaccaaagccctcattgactatgagaactcaaacaaagctctggataaggcccggttaaagagcaaagacgtcaagttggctgaggcacaccagcaggagtgctgccagaaatttgaacaactttccgaatctgcaaaagaagaactgataaatttcaaacggaagagagtggcagcatttagaaagaatctaattgaaatgtctgaactggaaataaaacatgccaggaacaatgtctcccttttgcagagctgtattgacttgttcaagaataactga

SEQ ID NO: 214 - DNA, 897 bp, Homo sapiens
atggacaacgcggggaaggagcgtgaggcagtacagctgatggcggaggccgagaagcgagtcaaggcctcccactccttcctccgagggctgtttggaggaaacacaagaatagaagaggcttgtgaaatgtataccagagctgcaaatatgttcaagatggctaaaaattggagtgctgcaggaaacgcattttgtcaggcagccaagctccacatgcagcttcagagcaaacatgactctgctaccagctttgtggatgctggaaatgcttacaaaaaggcagatccccaagaggctatcaactgcttaaatgcagccatcgacatttacacagacatgggaaggtttacaattgcagccaagcaccacattactattgcagagatctatgagactgaacttgtagacattgagaaggctattgcacattatgaacaatctgctgattattacaaaggagaagaatccaacagctcagcaaacaagtgtctgctgaaggtggcagcatatgctgcccagcttgagcagtaccagaaagccattgagatctatgagcaggttggggcaaacacaatggataatcctttgttgaaatacagtgcaaaggattacttcttcaaagctgccctctgccacttcatagtagacgagttgaatgccaagcttgctcttgagaaatatgaggaaatgtttccagcatttactgattcaagagaatgtaaattattgaaaaaactcctagaagctcatgaagaacagaacagtgaagcttacactgaagcagtgaaggaatttgactcaatatctcgcttggatcagtggctgaccaccatgttgcttcgcatcaaaaagtccatccaaggggatggagaaggagatggagacctaaaatga

SEQ ID NO: 215 - DNA, 2262 bp, Homo sapiens
atggagcgaagagcctggagtctgcagtgcactgctttcgtcctcttttgcgcttggtgtgcactgaacagtgcaaaagcgaaaaggcaatttgtcaatgaatgggcagcggagatccccgggggcccggaagcagcctcggccatcgccgaggagctgggctatgaccttttgggtcagattggttcacttgaaaatcactacttattcaaacataaaaaccaccccagaaggtctcgaaggagtgcctttcatatcactaagagattatctgatgatgatcgtgtgatatgggctgaacaacagtatgaaaaagaaagaagtaaacgttcagctctaagggactcagcactaaatctcttcaatgatcccatgtggaatcagcaatggtacttgcaagataccaggatgacggcagccctgcccaagctggaccttcatgtgatacctgtttggcaaaaaggcattacgggcaaaggagttgttatcaccgtactggatgatggtttggagtggaatcacacggacatttatgccaactatgatccagaggctagctatgattttaatgataatgaccatgatccatttccccgatatgatcccacaaacgagaacaaacacgggaccagatgtgcaggagaaattgccatgcaagcaaataatcacaaatgcggggttggagttgcatacaattccaaagttggaggcataagaatgctggatggcattgtgacggatgctattgaggccagttcaattggattcaatcctggacacgtggatatttacagtgcaagctggggccctaatgatgatgggaaaactgtggaggggcctggccggctagcccagaaggcttttgaatatggtgtcaaacaggggagacaggggaaggggtccatcttcgtctgggcttcgggaaacggggggcgtcagggagataattgtgactgtgatggctacacagacagcatctacaccatctccatcagcagtgcctcccagcaaggcctatccccctggtacgctgagaagtgctcctccacactggccacctcttacagcagcggagattacaccgaccagagaatcacgagcgctgacctgcacaatgactgcacggagacgcacacaggcacctcggcctctgcacctctggctgctggcatcttcgctctggccctggaagcaaacccaaatctcacctggcgagatatgcagcacctggttgtctggacctctgagtatgacccgctggccaataaccctggatggaaaaagaatggagcaggcttgatggtgaatagtcgatttggatttggcttgctaaatgccaaagctctggtggatttagctgaccccaggacctggaggagcgtgcctgagaagaaagagtgtgttgtaaaggacaatgactttgagcccagagccctgaaagctaatggagaagttatcattgaaattccaacaagagcttgtgaaggacaagaaaatgctatcaagtccctggagcatgtacaatttgaagcaacaattgaatattcccgaagaggagaccttcatgtcacacttacttctgctgctggaactagcactgtgctcttggctgaaagagaacgggatacatctcctaatggctttaagaattgggacttcatgtctgttcacacatggggagagaaccctataggtacttggactttgagaattacagacatgtctggaagaattcaaaatgaaggaagaattgtgaactggaagctgattttgcacgggacctcttctcagccagagcatatgaagcagcctcgtgtgtacacgtcctacaacactgttcagaatgacagaagaggggtggagaagatggtggatccaggggaggagcagcccacacaagagaaccctaaggagaacaccctggtgtccaaaagccccagcagcagcagcgtagggggccggagggatgagttggaggagggagccccttcccaggccatgctgcgactcctgcaaagtgctttcagtaaaaactcaccgccaaagcaatcaccaaagaagtccccaagtgcaaagctcaacatcccttatgaaaacttctacgaagccctggaaaagctgaacaaaccttcccagcttaaagactctgaagacagtctgtataatgactatgttgatgttttttataacactaaaccttacaagcacagagacgaccggctgcttcaagctctggtggacattctgaatgaggaaaattaa

SEQ ID NO: 216 - DNA, 10932 bp, Homo sapiens
atgggcaacgaggcgagcttggaaggggaagggctccccgaagggctggcggcggccgcagcggctggaggaggagctagcggggcggggagcccctctcacaccgcgatcccggccggcatggaggcggatttgagccagctgagcgaagaggagaggagacagatcgccgctgtcatgtcaagggcgcaggggctgcccaagggaagcgtccccccggccgctgcggagtcgccttccatgcacaggcatgcacagcatgatttggatagtagtcatcctccaaagcaatcaggaagacccccggaccctgggcgtccagctcaacctggtctcagtaaaagtagaactacagacactttcaggtcagagcagaaattgcctgggaggagtccttccactattagcttgaaagaatcaaagtccagaactgatttaaaggaagagcacaagtctagtatgatgcctggcttcctctcagaggttaacgctttaagtgctgtttcctctgttgtaaataaattcaacccttttgatttgatatcagactctgaggcatcccaggaagaaaccaccaagaaacaaaaagtggttcagaaggagcaaggaaaacctgaaggaatcataaaacctcctttacaacaacagccacccaagccgattcctaagcagcaaggacctggtagggatccgcttcagcaggatggcactcccaaatcaatatcttctcaacaaccagaaaaaattaaatcacaacctccaggtacaggaaagccaattcagggtcctacccagactcctcagacagaccatgcaaaattgccacttcaacgagatgcatccaggcctcagactaaacaggcagacatagtaaggggagaatcagttaaaccctcactgccaagcccatccaaaccacctattcagcaaccaactcctggaaaacctccagcacagcagcctggacatgaaaaatcacagcctgggcctgcaaagcccccagctcagccctcagggctaacaaagccattggctcaacaaccagggacagtgaaacccccagtccagccaccagggacaacaaagcctccagctcagcctcttggtcctgctaagcctccagctcagcagactgggtcagagaagccttcatcggagcagcctgggccaaaggctttagctcagcctcctggagttggaaagactccagctcaacagccagggccagcaaagcctccaacccagcaggtggggacaccaaaacccctagctcaacaacctgggctacagtctccagctaaggcacctgggcctacaaagactccacctggctcagcaaagcccccatctcaacagcctggctcaacaaaacccccacctcaacagcctggcccagcaaagccctcacctcaacagcctggctcaacaaaacccccatctcaacagcctggctcagcaaaaccctcagctcaacagcctagcccagcaaagccctcggctcagcaatctacaaaaccagtaagccaaacaggatctggaaaacctctgcagccaccaacagtgtctccatctgcaaaacagcctccttcacaaggcctccctaaaaccatctgtcctctttgcaataccactgaacttctgttgcatgttccagaaaaggccaattttaacacatgcactgagtgtcaaaccactgtctgtagtctctgtggttttaatcccaatcctcatttaacggaggtaaaagagtggctctgtttgaactgtcaaatgaaaagagctctaggcggggatctggctccagttccgtcatcaccccagcccaaactgaagactgcacctgttaccactacatcagcagtgagcaaatcatccccacagccacagcagacttccccaaagaaggatgctgcaccaaaacaggatctctccaaggcacctgagcctaaaaagccaccaccactagtgaaacaaccaacccttcatggctctccttcagccaaggccaagcagccccctgaggcagattctttgtccaagccagcccctcccaaagaaccttctgtcccatctgagcaggacaaggcccctgttgctgatgataaaccaaagcagcccaagatggtaaagccaaccactgaccttgtatcttcatcatcagcaacaacaaaacctgatattccaagctccaaagtacagtcacaagctgaagagaaaacaacccctcctctaaaaacagactctgccaaaccctcacagagttttccaccaacaggggaaaaagtcagcccatttgattctaaagccatacctcgacctgcatcagattcaaaaattatttcacatcctggtcccagttcagagagcaaaggtcaaaaacaagttgaccccgtacaaaagaaggaagaacccaagaaagcacaaaccaaaatgagtcctaaaccagatgccaagccaatgccaaaagggtcaccaacaccccctggcccacgacctaccgctggccaaactgtccccacacctcaacagtccccaaagcctcaggagcagtcaaggcgtttcagtctgaatctgggaagtattactgatgcccccaaatcacagcctacaactcctcaagagaccgtgactgggaaactctttgggtttggagcatcaatcttcagccaggcatcaaatttaatttccactgcaggccaacctggacctcattcacaaagtggaccaggggccccaatgaaacaagcccctgccccttcacagccacctacttcacaagggccacccaaatccacaggtcaagcaccaccagcacctgcaaaaagtatacctgtgaaaaaggaaacaaaagccccagcagctgaaaaattagagcccaaagctgaacaagctccaacagtaaaaagaacagaaacagaaaaaaagccaccacctattaaggatagcaaatctttaacagctgagcctcaaaaggctgtccttcccacaaaactggagaaatcgcccaaaccagaatcaacctgtcctctctgcaaaactgaactcaacataggttctaaggatcctcctaacttcaatacttgcactgaatgcaagaatcaagtgtgtaatctctgtggatttaaccctacaccacatttgactgaggtaaaatggctttgtttaaattgccaaacccagagagcaatatcaggacagcttggagacatacgcaaaatgccacctgcaccatcaggacccaaagcatctcctatgcctgttcctacagaatcatcatctcagaaaacagcagtgcctccccaagtaaaattagtgaaaaagcaagaacaagaagtaaaaacggaagctgaaaaagtcattctggaaaaagtaaaggaaacactatcaatggaaaaaattcctcctatggtaaccacagatcaaaaacaagaagagagtaaactagagaaagacaaagcttcagctcttcaagaaaaaaagccactccctgaagaaaaaaaactaatccctgaagaagaaaagatacgttctgaagaaaaaaagccactcctagaagaaaaaaagccaacccctgaagacaaaaagctactcccagaggcaaaaacatcagccccagaagaacagaaacatgacttacttaaatctcaagtacaaattgctgaagaaaagcttgaaggcagagtggctccaaagacagtgcaagaagggaaacaaccacagaccaagatggaaggtttaccatctggcacacctcagagtttacctaaagaagatgataagacaaccaaaacaataaaagaacagccacagccaccatgcacagcaaaacctgatcaggaaaaggaagatgacaaatcagacacctcaagttctcagcagcctaaaagcccccaaggtctgagcgacacgggatattcttccgatggaatatcaagctcacttggtgaaattccaagtcttattccaactgatgaaaaggatattctcaagggactcaaaaaggactctttttcacaagaaagcagcccttccagcccctcagatttggctaagttagaaagtacagtcctatctattttggaagctcaagcaagtacacttgctgatgaaaagtcagaaaagaaaacacaaccccatgaagtttctcctgaacagcctaaagaccaagagaaaactcagagtttatctgaaaccttggaaattactatttcagaagaggagatcaaagagagtcaagaagaaaggaaagacacttttaaaaaagatagccaacaagatattccttccagcaaggaccataaagagaagtctgagtttgttgatgacataactactagaagagagccttatgattcagttgaagagagtagtgaaagtgaaaactcacctgttccacaaagaaaacgaagaactagtgttggctcatcaagcagtgatgagtataaacaggaagacagccaaggatcaggggaagaggaggacttcattcgaaaacaaatcatagaaatgagtgctgatgaagatgcttcaggttctgaagatgatgagttcatcagaaaccagctcaaagagattagtagcagtactgagagccagaagaaggaagaaacaaagggaaaaggcaaaataacagcagggaaacacagacgactgactcgaaaaagtagcacaagcattgatgaagatgcaggaagacgtcactcatggcatgatgaagacgatgaagcatttgatgaaagtcctgaacttaaatacagagaaactaaaagtcaggaaagtgaagaacttgtagttactggaggaggagggctacgccgatttaaaacaattgagctcaacagtacaatagcagataaatattctgcagagtcatcacagaaaaaaacaagtttgtattttgacgaagagccagaattggaaatggaaagcctgacagactcacctgaagataggtcaaggggagagggatcttcgagtctgcatgcttccagcttcactcctggtacatcccctacatcagtatcatcacttgatgaggacagtgacagtagcccgagtcacaaaaaaggagagagcaaacagcaacgcaaagctcggcacagaccacatggccctcttttgcctactattgaagattcttcagaggaagaagaattgagagaggaagaagaattattaaaggagcaagaaaagcagagggaaatagaacagcaacaaagaaagagttctagtaaaaaatcaaagaaagacaaagatgaacttcgagctcagagaagaagggaaaggccaaagacaccacctagtaatctctctcccattgaagatgcatctccgacagaagagttacgtcaggctgcagaaatggaggagctccatagatcttcttgttctgaatattcacctagcatagagtcagacccagaaggttttgaaataagcccggaaaaaataatagaagtacaaaaagtttataaattgcccacagctgtttcattatactcaccaacagatgagcaatctattatgcagaaagaaggtagccaaaaggcgttaaaaagtgctgaggagatgtatgaagaaatgatgcataaaacacacaaatacaaagcttttccagctgcaaatgaacgagatgaagtgtttgaaaaagagcctttgtatggtgggatgctaatagaggattatatttatgaatctttagtagaagacacgtacaatggatcggtagatggcagtctgctaacaaggcaagaagaagaaaatggatttatgcagcagaaaggaagagagcaaaagataagactttcagaacagatttatgaagatcctatgcagaaaattacagacctccagaaagagttttatgagttagaaagcttacattctgttgtgcctcaggaagatattgtttcaagctcttttatcatcccagaaagccatgagatagtggacctgggtactatggtaacttctacagaagaagaaaggaaactactagatgctgatgctgcctatgaagaacttatgaagaggcaacagatgcaattaacacctggatctagcccaacccaggcccccattggtgaggatatgacagagtccaccatggactttgacagaatgccagatgcctctttgacatcaagtgttctctcaggagcgtctcttacagattcgaccagcagtgcaacactctctatcccagatgttaaaataacccaacatttttcaacagaagaaattgaggatgaatatgtaaccgattatacaagagaaattcaagagataattgcccatgaatcgctgattttgacctactcggagccttcagaaagtgctacatctgtcccaccctctgacacaccttctctcacatcatctgtttcttcggtctgtaccacagatagctcttcacccattactaccctggatagcataaccacagtttatacagagccagtggacatgataactaaatttgaagattctgaggaaatttcttcatcaacttattttccaggcagcattatagactatccagaagaaataagtgtatctttagatcggactgccccaccagatggtagagctagtgctgatcatattgttatttccttatctgatatggcatcttctatcatagaatctgtagtacctaaacctgaagggccagttgctgacactgtttctactgacttacttatatctgaaaaggacccagtgaagaaagccaagaaggaaactgggaatggaatcattctggaagttttggaagcttacagagataaaaaggagttggaggccgaacgaacaaaaagtagcttatccgaaaccgtgtttgatcacccaccttcttctgtaatagcccttccaatgaaagagcagctttcaactacatactttacatctggagagacctttggtcaggaaaaacctgcatctcagttaccatctggcagtccttctgtttcctctcttccagctaaacctcgcccattctttagaagttcttctttggatatatcagctcaacctcctccccctcctccccctccccctcctcctcctcctccaccaccaccccctcctcccccaccacttcctccaccaacttcacctaaaccaactattcttcctaaaaaaaagttaacagttgcatctccagtgactacagctacacctctgtttgatgctgttactactctagagaccacagctgttctgagaagtaatggattacctgttacaagaatatgtactactgcacctcctcctgttcctcctaagccatcttcaattccatctggacttgtatttacccacaggcctgagccaagcaaacctccaatcgcccccaaaccagtgattcctcagcttccaacaactacacaaaaaccaacagatatacaccccaaaccaacaggcctatctttaacttcaagtatgaccttaaatttagtgacttcagcagattataaattgccttcccctacctccccactttccccacactccaacaagtcttcaccaagattttccaaatccctcacagaaacttatgtagttattacattgccatctgaaccagggactccaacagattcttctgctagtcaagcaattaccagttggcccttgggatcaccctccaaagatctggtttctgttgaacctgtgttttctgtagttcctcctgtgacagctgtagaaattccaatttcttcagaacagaccttctacatctctggagctttacagacattttctgctacccctgtcacagcaccctcttcatttcaagcagctcccacatcagttacacagtttctcactactgaagtttccaagactgaggtttcagcaaccagaagtacagctcctagtgttggtctcagcagcatttccataacaattcctccagagcctcttgctctagataacatacatttagagaagcctcagtataaagaagatggaaaattgcaacttgttggtgatgtaattgatttgcgtacagtaccaaaggtagaagttaaaacaactgataaatgtattgatctttctgcttctacaatggatgtgaaaaggcagatcacagcaaatgaagtttatgggaaacaaattagtgctgtccaaccctctattataaatcttagtgtgacatcatcaatagtgactcctgtatctctggccactgagacagtgacctttgtcacatgcacagctagtgcaagttacactacaggcacagaaagcctagtgggtgcagaacatgcaatgacaacaccactccaacttacaacatcaaagcatgctgagcccccatacaggataccaagtgaccaggtctttcctatagctagggaagaagcaccaataaacttatctctaggtactccagcacatgcagtgacattggctattacaaaacctgtcactgtgcctcctgttggtgtcacaaatggatggactgatagcaccgtatcccagggaatcactgatggggaagtagtggatctcagtacaaccaagtctcacagaacagtcgtaacaatggatgagtctacttcaagtgtgatgaccaaaataatagaagatgaaaaacccgttgatttaaccgcagggagaagagctgtgtgctgtgatgtggtttataaattaccatttggaaggagctgcacagcacagcagcctgcaactactcttcctgaggatcgttttggttatagggatgaccactatcagtatgatcgatcagggccatatggttatagagggattgggggaatgaagccttccatgtctgacacaaatttagcagaagctggacattttttctataaaagtaagaatgcttttgattattctgaaggaactgacacagcagtagatctgacttcagggagagttactacaggtgaggtaatggattattcaagcaagactacaggtccatatccagaaacacgacaagtcatttcaggagctgggattagtaccccacagtattccacagcaagaatgacaccaccaccaggaccccagtattgtgtggggagtgttttgaggtcatctaatggtgttgtctattcttcagtagcaactccaacaccctctacatttgctatcaccacacaacctggctccattttcagcaccacagtgagggatttgtctggtattcatacggctgatgcagtgacttcattacctgccatgcaccatagccagccaatgcctagatcatattttataacaacaggtgcatctgaaacggacattgcagtaactggtattgatatcagtgccagtttgcaaactattactatggagtctcttactgctgagacgatagactctgttcccactttaaccacagcatccgaagtgtttcctgaagtggtgggagatgaaagtgctcttttaattgtccctgaagaagataaacaacagcagcagctagacttggagcgtgagctcctggaactggagaaaattaagcaacagcgctttgctgaggaattggagtgggaacgtcaggaaattcaaaggttccgagaacaagaaaagatcatggttcagaaaaagttggaggagctgcagtctatgaagcaacaccttctctttcagcaagaagaagagcggcaagcccagttcatgatgaggcaggagacgttagctcagcaacagttacagcttgagcagatccaacagctgcaacaacagcttcaccagcagctggaggagcaaaagattcggcagatctaccagtataactatgacccttctggaactgcttctccacaaaccactacagagcaggcaattttggaaggtcagtatgctgctctggaaggcagtcaattttgggcaactgaagatgcaaccaccacagcttcagctgttgtggcaattgaaataccacaaagccaaggatggtacaccgttcagtctgatggtgttactcagtacattgccccacctggtatcctgagcactgtttcagaaatacctctaacagatgttgttgtgaaagaggaaaaacaacccaaaaagagaagttctggagctaaagtccgaggacagtatgatgacatgggagaaaatatgacagatgatccccgaagttttaaaaagatagtggacagtggtgtacaaacggatgacgaagatgccacagatcggagctatgtgagtaggagaaggagaactaaaaagagtgtggatacaagcgtccaaactgatgatgaagatcaggatgagtgggatatgcctactagatcaaggaggaaagctcgtgtagggaaatatggtgacagcatgacagaggctgacaagaccaaacccctttccaaagtctccagcatagcagttcaaacggtagcagagatatctgtgcaaactgaaccagttggaaccataagaacaccctccatacgggcacgagtggatgccaaggtagaaataattaaacacatttcagcacctgaaaagacttacaaagggggcagtttaggatgtcaaacagaagcagattcagacacacaaagtcctcaatatctgagtgccacatctccacccaaagacaagaaacgcccaacacctttagagattggttattcatctcacctccgggcagattccacagtacagctggctccttccccacccaaatcccccaaagtcctttactcacccatctcaccactttcaccaggcaaagccttagaatcagcctttgtaccttatgaaaaacccctccctgatgatataagtccacagaaagtactgcatccagatatggctaaagttcccccagcaagtcctaagacagccaagatgatgcagcgttctatgtctgaccccaagcctctgagtccaacagcagacgaaagttccagggctccttttcagtataccgagggctatacg

SEQ ID NO: 217 - DNA, 4251 bp, Homo sapiens
atgtcggctcctgtcgggccccggggccgcctggctcccatcccggcggcctctcagccgcctctgcagcccgagatgcctgacctcagccacctcacggaggaggagaggaaaatcatcctggccgtcatggataggcagaagaaagaagaggagaaggagcaggtcaaagaagaacacaaaccacaactgacacagtggtttccctttagtggaatcactgaactggtaaataacgttcttcagccccagcaaaaacaacaaaatgaaaaggagccccagacaaaactgcatcagcagtttgaaatgtataaagagcaggtaaagaagatgggagaagaatcacagcaacagcaagaacagaagggtgatgcgccaacctgtggtatctgccacaaaacaaagtttgctgatggatgtggccataactgttcatattgccaaacaaagttctgtgctcgttgtggaggtcgagtgtcattacgctcaaacaaggttatgtgggtatgtaatttgtgccgaaaacaacaagaaatcctcactaaatcaggagcatggttttataatagtggatctaatacaccacagcaacctgatcaaaaggttcttcgagggctaagaaatgaggaggcacctcaggagaagaaaccaaaactacatgagcagacccagttccaaggaccctcaggtgacttatctgtacctgcagtggagaaaagtcgatctcatgggctcacaagacagcattctattaaaaatgggtcaggcgtgaagcatcacattgccagtgacatagcttcagacaggaaaagaagcccatctgtgtccagagatcagaatagaagatacgaccaaagggaagaaagagaggaatattcacagtatgctacttcggataccgcaatgcctagatctccatcagattatgctgataggcgatctcaacatgaacctcagttttatgaagactctgatcatttaagttatagggactccaacaggagaagtcataggcattccaaagaatatattgtagatgatgaggatgtggaaagcagagatgaatacgaaaggcaaaggagagaggaagagtaccagtcacgctaccgaagtgatccgaatttggcccgttatccagtaaagccacaaccctatgaagaacaaatgcggatccatgctgaagtgtcccgagcacggcatgagagaaggcatagtgatgtttctttggcaaatgctgatctggaagattccaggatttctatgctaaggatggatcgaccatcaaggcaaagatctatatcagaacgtagagctgccatggaaaatcagcgatcttattcaatggaaagaactcgagaggctcagggaccaagttcttatgcacaaaggaccacaaaccatagtcctcctacccccaggaggagtccactacccatagatagaccagacttgaggcgtactgactcactacggaaacagcaccacttagatcctagctctgctgtaagaaaaacaaaacgggaaaaaatggaaacaatgttaaggaatgattctctcagttcagaccagtcagagtcagtgagacctccaccaccaaagcctcataaatcaaagaaaggcggtaaaatgcgccagatttcgttgagcagttcagaggaggaattggcttccacgcctgaatatacaagttgtgatgatgttgagattgaaagtgagagtgtaagtgaaaaaggggacagtcaaaagggaaaaagaaaaactagtgagcaggcagttttgtcggactctaacaccaggtctgagagacaaaaggaaatgatgtactttggtggccactctttggaagaggatttggaatggtctgaacctcagattaaggactctggggtagatacgtgtagtagcacaacccttaacgaggagcatagccatagtgataagcaccctgtaacctggcaaccatctaaagatggagatcgtttaattggtcgcattttattaaataagcgtctaaaagatggaagtgtacctcgagattcaggagcaatgcttggcttgaaggttgtaggaggaaagatgactgaatcaggtcggctttgtgcatttattactaaagtaaaaaaaggaagtttagctgatactgtaggacatcttagaccaggtgatgaagtattagaatggaatggaagactactgcaaggagccacatttgaggaagtgtacaacatcattctagaatccaaacctgaaccacaagtagaacttgtagtttcaaggcctattggagatataccgcgaatacctgatagcacacatgcacaactggagtccagttctagctcctttgaatctcaaaaaatggatcgtccttctatttctgttacctctcccatgagtcctggaatgttgagggatgtcccacagttcttatcaggacaactttcaataaaactatggtttgacaaggttggtcaccaattaatagttacaattttgggagcaaaagatctcccttccagggaagatgggaggccaaggaatccttatgttaaaatttactttcttccagacagaagtgataaaaacaagagaagaactaaaacagtaaagaaaacattggaacccaaatggaaccaaacattcatttattctccagtccaccgaagagaatttcgggaacgaatgctagagattaccctttgggatcaagctcgtgttcgagaggaagaaagtgaattcttaggcgagattttaattgaattagaaacagcattattagatgatgagccacattggtacaaacttcagacgcatgatgtctcttcattgccacttccccacccttctccatatatgccacgaagacagctccatggagagagcccaacacggaggttgcaaaggtcaaagagaataagtgatagtgaagtctctgactatgactgtgatgatggaattggtgtagtatcagattatcgacatgatggtcgagatcttcaaagctcaacattatcagtgccagaacaagtaatgtcatcaaaccactgttcaccatcagggtctcctcatcgagtagatgttataggaaggactagatcatggtcacccagtgtccctcctccacaaagtcggaatgtggaacaggggcttcgagggacccgcactatgaccggacattataatacaattagccgaatggacagacatcgtgtcatggatgaccattattctccagatagagacagggattgtgaagcagcagatagacagccatatcacagatccagatcaacagaacaacggcctctccttgagcggaccaccacccgctccagatccactgaacgtcctgatacaaacctcatgaggtcgatgccttcattaatgactggaagatctgcccctccttcacctgccttatcgaggtctcatcctcgtactgggtctgtccagacaagcccatcaagtactccagtcgcaggacgaaggggccgacagcttccacagcttccaccaaagggaacgttggatagaaaagcaggaggtaaaaaactaaggagcactgtccaaagaagtacagaaacaggcctggccgtggaaatgaggaactggatgactcgacaggcaagccgagagtctacagatggtagcatgaacagctacagctcagaaggaaatctgattttccctggtgttcgcttggcctctgatagccagttcagtgatttcctggatggccttggccctgctcagctagtgggacgccagactctggcaacacctgcaatgggtgacattcaggtaggaatgatggacaaaaagggacagctggaggtagaaatcatccgggcccgtggccttgttgtaaaaccaggttccaagacactgccagcaccgtatgtaaaagtgtatctattagataacggagtctgcatagccaaaaagaaaacaaaagtggcaagaaaaacgctggaacccctttaccagcagctattatctttcgaagagagtccacaaggaaaagttttacagatcatcgtctggggagattatggccgcatggatcacaaatcttttatgggagtggcccagatacttttagatgaactagagctatccaatatggtgatcggatggttcaaacttttcccaccttcctccctagtagatccaaccttggcccctctgacaagaagagcttcccaatcatctctggaaagttcaactggaccttcttactctcgttcatag

SEQ ID NO: 218 - DNA, 1212 bp, Homo sapiens
atgtaccgggacccggaggcggccagcccaggggcgccctcgcgcgacgtcctgctggtctctgccatcatcaccgtcagccttagcgtcactgtcgtcctctgcggcctctgccactggtgtcagcgcaaactgggcaaacgctacaagaattccttggagacggtgggcacgccagactcagggcgtgggcgcagtgagaagaaggctatcaagttgcctgcaggagggaaggcggtgaacacagcccccgtgccaggccagacaccccacgatgagtccgaccgccggaccgagccacgttcctccgtctcagacctcgtcaactccctcaccagcgagatgctcatgctctccccaggctccgaggaggatgaggcccacgagggttgcagccgagagaacctgggccggatccagttcagtgtcggctacaacttccaggagtccacgctcaccgtgaagatcatgaaggcccaggagctgccggccaaggacttcagcggcaccagcgaccccttcgtcaagatctacctgctgcccgacaagaagcacaagctggagaccaaggtgaagcggaagaacctgaacccccactggaacgagaccttcctctttgaaggttttccctatgagaaggtggtgcagaggatcctctacctccaagtcctggactatgaccgcttcagccgcaacgaccccattggggaggtgtccatcccccttaacaaggtggacctgacccagatgcagaccttctggaaggatctgaagccatgcagcgatgggagtgggagccgaggggagctgctcttgtctctctgctacaacccctctgccaactccatcatcgtgaacatcatcaaagcccggaacctcaaagccatggacatcgggggcacatcagacccctacgtgaaggtatggctgatgtacaaggacaagcgggtggagaagaagaagacggtgacgatgaagaggaacctgaaccccatcttcaatgagtccttcgccttcgatatccccacggagaagctgagggagacgaccatcatcatcactgtcatggacaaggacaagctcagccgcaatgacgtcatcggcaagatctacctgtcctggaagagcgggccaggggaggtgaagcactggaaggacatgattgcccgtccccggcagcccgtggcccagtggcaccagctgaaggcctga

SEQ ID NO: 219 - DNA, 1704 bp, Homo sapiens
atcgatgacgtggacattgacctccacatcaacatcagcttcctcgatgaggaagtctctacagcctggaaggtcctccggacagaacctattgtgttgaggctgcgattttctctctcccagtacctagatggaccagaaccatccattgaggttttccagccatcaaataaggaaggatttgggctgggtcttcagttgaaaaagatcctgggtatgtttacatcccaacaatggaaacatctgagcaatgatttcttgaagacccagcaggagaagaggcacagttggttcaaggcaagtggtaccatcaagaagttccgagctggcctcagcatcttttcacccatccccaagtctcccagtttccctatcatacaggactccatgctgaaaggcaaactaggtgtaccagagcttcgggttgggcgcctcatgaaccgttccatctcctgtaccatgaagaaccccaaagtggaagtgtttggctaccctcccagcccccaggcaggtctcctgtgccctcagcacgtgggcctccctcccccagcacggacctctcctttggtcagtggtcactgcaagaacattcccactctggagtatggattcctcgttcagatcatgaagtatgcagaacagaggattccaacattgaatgagtactgtgtggtgtgtgatgagcagcatgtcttccaaaatggatctatgctgaagccagctgtctgtactcgtgaactatgcgttttctccttctacacactgggcgtcatgtctggagctgcagaggaggtggccactggagcagaggtggtggatctgctggtggccatgtgtagggcagctttagagtcccctagaaagagcatcatctttgagccttatccctctgtggtggaccccactgatcccaagactctggcctttaaccctaagaagaagaattatgagcggcttcagaaagctctggatagtgtgatgtctattcgggagatgacccagggctcatatttggaaatcaagaaacagatggacaagttggatcccctggcccatcctctcctgcagtggatcatctctagcaacaggtcacacattgtcaaactacctctcagcaggctgaagttcatgcacacctcacaccagttcctcctgctgagcagccctcctgccaaggaggctcggttccggaccgccaagaagctctatggcagcacctttgccttccatgggtcccacattgagaactggcattcgatcctgcgcaatgggctggtcaatgcatcctacaccaaactgcagctgcatggagcagcctatggcaaaggcatctacctgagccccatctccagtatttcctttggatactcaggaatgggaaaaggacagcacaggatgccctccaaggatgagctggtccagagatacaacaggatgaataccatcccccagacccgatccattcagtcacggttcctgcagagtcggaatctaaactgtatagcactttgtgaagtgattacatctaaggacctccagaagcatgggaacatctgggtgtgccctgtgtccgaccatgtctgcacaagattcttctttgtatatgaggatggtcaggtgggcgatgccaacattaatactcaggaccccaagatacagaaggaaatcatgcgtgtgatcggaactcaggtttacacaaactga

SEQ ID NO: 220 - DNA, 573 bp, Homo sapiens
tttttagtggccacagatgtctttaattccaaaaacctggccgttcaggcacaaaagaagatcttgggtaaaatggtgtccaaatccatcgccaccaccttaatagacgacacaagtagtgaggtgctggatgagctctacagagtgaccagggagtacacccaaaacaagaaggaggcagagaagatcatcaagaacctcatcaagacagtcatcaagctggccattctttataggaataatcagtttaatcaagatgagctagcattgatggagaaatttaagaagaaagttcatcagcttgctatgaccgtggtcagtttccatcaggtggattatacctttgaccggaatgtgttatccaggctgttaaatgaatgcagagagatgctgcaccaaatcattcagcgccacctcactgccaagtcacatggacgggttaataatgtgtttgatcatttttcagattgtgaatttttggctgccttgtataatccttttgggaattttaaaccccacttacaaaaactatgtgatggtatcaacaaaatgttggatgaagagaacatatga

SEQ ID NO: 221 - DNA, 2961 bp, Homo sapiens
aacctcaacccggtgtgggaggagaatttccactttgaatgtcacaattcctccgaccgcatcaaggtgcgcgtctgggacgaggatgacgacatcaaatcccgcgtgaaacagaggttcaagagggaatctgacgatttcctggggcagacgatcattgaggtgcggacgctcagcggcgagatggacgtgtggtacaacctggacaagcgaactgacaaatctgccgtgtcgggtgccatccggctccacatcagtgtggagatcaaaggcgaggagaaggtggccccgtaccatgtccagtacacctgtctgcatgagaacctgttccacttcgtgaccgacgtgcagaacaatggggtcgtgaagatcccagatgccaagggtgacgatgcctggaaggtttactacgatgagacagcccaggagattgtggacgagtttgccatgcgctacggcgtcgagtccatctaccaagccatgacccactttgcctgcctctcctccaagtatatgtgcccaggggtgcctgccgtcatgagcaccctgctcgccaacatcaatgcctactacgcacacaccaccgcctccaccaacgtgtctgcctccgaccgcttcgccgcctccaactttgggaaagagcgcttcgtgaaactcctggaccagctgcataactccctgcggattgacctctccatgtaccggaataacttcccagccagcagcccggagagactccaggacctcaaatccactgtggaccttctcaccagcatcaccttctttcggatgaaggtacaagaactccagagcccgccccgagccagccaggtggtaaaggactgtgtgaaagcctgccttaattctacctacgagtacatcttcaataactgccatgaactgtacagccgggagtaccagacagacccggccaagaagggggaagttctcccagaggaacaggggcccagcatcaagaacctcgacttctggtccaagctgattaccctcatagtgtccatcattgaggaagacaagaattcctacactccctgcctcaaccagtttccccaggagctgaatgtgggtaaaatcagcgctgaagtgatgtggaatctgtttgcccaagacatgaagtacgccatggaggagcacgacaagcatcgtctatgcaagagtgccgactacatgaacctccacttcaaggtgaaatggctctacaatgagtatgtgacggaacttcccgccttcaaggaccgcgtgcctgagtaccctgcatggtttgaacccttcgtcatccagtggctggatgagaatgaggaggtgtcccgggatttcctgcacggtgccctggagcgagacaagaaggatgggttccagcagacctcagagcatgccctattctcctgctccgtggtggatgttttctcccaactcaaccagagctttgaaatcatcaagaaactcgagtgtcccgaccctcagatcgtggggcactacatgaggcgctttgccaagaccatcagtaatgtgctcctccagtatgcagacatcatctccaaggactttgcctcctactgctccaaggagaaggagaaagtgccctgcattctcatgaataacactcaacagctacgagttcagctggagaagatgttcgaagccatgggaggaaaggagctggatgctgaagccagtgacatcctgaaggagcttcaggtgaaactcaataacgtcttggatgagctcagccgggtgtttgctaccagcttccagccgcacattgaagagtgtgtcaaacagatgggtgacatccttagccaggttaagggcacaggcaatgtgccagccagtgcctgcagcagcgtggcccaggacgcggacaatgtgttgcagcccatcatggacctgctggacagcaacctgaccctctttgccaaaatctgtgagaagactgtgctgaagcgagtgctgaaggagctgtggaagctggttatgaacaccatggagaaaaccatcgtcctgccgcccctcactgaccagacgaggtcagggaacctcttgagaaaacatggcaagggattagaaaagggcagggtgaaattgccaagccactcagacggaacccagatgatcttcaatgcagccaaggagctgggtcagctgtccaaactcaaggatcacatggtacgagaagaagccaagagcttgaccccaaagcagtgcgcggttgttgagttggccctggacaccatcaagcaatatttccacgcgggtggcgtgggcctcaagaagaccttcctggagaagagcccggacctgcaatccttgcgctatgccctgtcgctctacacgcaggccaccgacctgctaatcaagacctttgtacagacgcaatcggcccagggcttgggtgtagaagaccctgtgggtgaagtctctgtccatgttgagctgttcactcatccaggaactggggaacacaaggtcacagtgaaagtggtggctgccaatgacctcaagtggcagacttctggcatcttccggccgttcatcgaggtcaacatcattgggccccagctcagcgacaagaaacgcaagtttgcgaccaaatccaagaacaatagctgggctcccaagtacaatgagagcttccagttcacgctgagcgccgacgcgggtcccgagtgctatgagctgcaggtgtgcgtcaaggactactgcttcgcgcgcgaggaccgcacggtggggctggccgtgctgcagctgcgtgagctggcccagcgcgggagcgccgcctgctggctgccgctcggccgccgcatccacatggacgacacgggcctcacggtgctgcgaatcctctcgcagcgcagcaacgacgaggtggccaaggagttcgtgaagctcaagtcggacacgcgctccgccgaggagggcggtgccgcgcctgcgccttag

SEQ ID NO: 222 - DNA, 663 bp, Homo sapiens
atggcatccgccacagactcgcgctatgggcagaaggagtcctcggatcagaacttcgactacatgttcaagattctcatcatcggcaacagcagcgtgggcaagacgtccttcctcttccgctatgctgacgactcgttcacgcctgccttcgtcagcaccgtgggcatcgacttcaaggtcaagaccatctatcgcaacgacaagaggatcaagctgcagatctgggacacagcagggcaagagcggtaccggaccatcaccaccgcatactaccggggcgctatgggcttcatcctcatgtatgacatcaccaacgaggaatccttcaatgcagtgcaggactggtccacccagatcaagacctactcatgggacaatgcccaggtgctgctggtaggaaacaagtgtgacatggaggatgagcgggtggtgtcatcagaacgtggccggcagctagctgaccaccttgggttcgagttctttgaggcaagcgccaaggacaacattaacgtcaagcagacctttgagcgcctggtggatgtcatctgcgagaagatgtccgagtcgttggacacggcggaccctgcggtcacaggcgccaagcagggcccacagctcagtgaccagcaggtgccaccgcaccaggactgcgcctgctga

SEQ ID NO: 223 - DNA, 1059 bp, Homo sapiens
cagacaccaacggtcggaaaccgccagacaccaacgctcggaatccacgccaggccacgacggagggcgactacctcccttctgaccctgctgctggcgttcggaaaaaacgcagtccggtgtgctctgattggtccaggctctttgacgtcacggactcgacctttgacagagccactaggcgaaaaggagagacgggaagtattttttccgccccgcccggaaagggtggagcacaacgtcgaaagcagccgttgggagcccaggaggcggggcgcctgtgggagccgtggagggaactttcccagtccccgaggcggatccggtgttgcatccttggagcgagctgagagctcgagtacagaacctgctaaggccatcaaacctattgatcggaagtcagtccatcagatttgctctgggccggtggtaccgagtctaagcactgcggtgaaggagttagtagaaaacagtctggatgctggtgccactaatattgatctaaagcttaaggactatggagtggatctcattgaagtttcaggcaatggatgtggggtagaagaagaaaacttcgaaggcttaactctgaaacatcacacatctaagattcaagagtttgccgacctacctcaggttgaaacttttggctttcggggggaagctctgagctcactttgtgcactgagtgatgtcaccatttctacctgccatgtatcggcgaaggttgggactcgactggtgtttgatcactatgggaaaatcatccagaaaaccccctacccccaccccagagggatgacagtcagtgtgaagcagttattttctacgctacctgtgcaccataaagaatttcaaaggaatattaagaagaaacgtgcctgcttccccttcgccttctgccgtgattgtcagtttcctgaggcctccccagccatgcttcctgtacagcctgcagaactgactcctagaagtaccccaccccacccctgctccttggaggacaacgtgatcactgtattcagctctgtcaagaatggtccaggttcttctagatga

SEQ ID NO: 224 - DNA, 3327 bp, Homo sapiens
gcttccctcactgggtcctgcgtccttgggcaggcgatgcccctgcggggaggggctggtccatccccggccagccacggacccacgcatggacccagcgacccacggacctgcttacctgggcgcggcgcgggtggcatgcggccacacggaaggggcgcgctgggctgctgcggcctctgcagcttctacacctgccacggggcggccggagatgaaatcatgcaccaggacatcgtcccgctctgtgctgccgacatccaggaccagctaaagaagcgctttgcttacctgtccggtgggcgggggcaggacggaagcccggttatcaccttccctgactacccggccttcagcgagattccggacaaggagttccagaatgtcatgacctacctcaccagcatccccagcctgcaggacgctggcatcggattcatcctggtgatagaccggcgacgggacaaatggacctccgtgaaggcgtccgtcctgcgcatcgcagcatctttcccggcaaacctgcagctcgtcctcgtgcttcgcccgacgggttttttccaaaggactctctccgacatcgctttcaaattcaatagagatgactttaagatgaaggtgccggtcataatgctgagctccgtaccagacttacacggttacatcgataagtcgcagctgaccgaggacctgggtgggaccctggactactgccactcccggtggctgtgccagcgcacggccatcgaaagtttcgccctcatggtgaagcagacggctcagatgctgcagtccttcgggaccgagctggctgaaacagagctgcccaatgacgtccagtcgacaagctcagtgctgtgtgcgcacacagagaagaaggacaaggcgaaggaggatttgaggctggcactgaaagaggggcacagtgtcctggagagcctcagggagctgcaggctgagggctcagagcccagtgtgaaccaggaccagcttgacaaccaggccaccgtgcagaggctcctggcccagctgaacgaaaccgaggctgccttcgatgagttctgggcaaagcatcagcagaaactggagcagtgtctgcagctccggcactttgagcagggcttccgggaggtcaaagccatcttggacgcagcgtcccagaagatagcaaccttcacagacatcggcaacagcctggcgcatgtggagcacctgctgagggacctggccagcttcgaggagaaatcaggcgtggccgtggagagggcccgggccctgtctctggacggcgagcagctcattgggaacaagcactacgcggtagactccatccgcccaaagtgccaggagctccggcacctctgtgaccagttctctgcggagatcgcaaggaggagggggctgctcagcaagtccctggagctgcaccgccgcctggagacgtccatgaagtggtgtgatgaagggatttacctgctggcctcacaacctgtggacaagtgccagtcccaggacggcgcggaggctgccctccaggaaatcgagaagtttttggagaccggtgcggaaaataagatccaggagctcaacgcgatttacaaggaatacgaatccatcctcaaccaagatctcatggagcacgtgcgaaaggtcttccagaagcaggcaagcatggaggaggtgttccaccgcaggcaggccagcctgaagaagctggcggccaggcagacgcggcccgtgcagccggtggcccccagacccgaggcactggcaaagtcgccctgcccctccccaggcattcggcgaggctctgagaactccagctccgagggcggtgcgctccggagagggccctaccggagggccaagagtgagatgagtgagagccggcagggccgcggctcagcgggggaggaggaggaaagcctggccatcctgcgcaggcacgtgatgagcgagctcctggacacagaacgggcctacgtggaggagctgctgtgcgtcctggagggctacgccgcggagatggataacccactgatggctcacctcctgtcaacaggccttcacaacaagaaggatgttttgtttggaaacatggaggaaatctatcacttccacaacaggatattcctcagggagctggaaaactacactgactgcccagaactggttggaagatgctttctggagaggatggaagatttccagatctatgagaagtactgtcagaacaagccccgctctgagagcctgtggagacagtgctccgactgcccgtttttccaggaatgccagagaaagctggaccacaagctgagcctggactcctacctgctgaagccagtgcagaggatcaccaagtaccagctgctgctcaaggaaatgctgaaatacagcaggaactgcgagggggctgaggacctgcaggaggcgctgagctccatcctgggcatcctgaaggccgtgaacgactccatgcacctcatcgctatcaccggctatgacgggaatctcggcgacctgggcaagctgctgatgcagggctcgttcagcgtctggaccgaccacaagaggggccacaccaaggtgaaggagctggccaggttcaagcccatgcagcggcacctgttcctgcacgagaaggcagtgctcttctgcaagaagagggaggagaatggggaggggtatgagaaagctccctcctacagctacaagcagtccttaaacatggctgccgttggcattacggagaacgtgaagggagatgctaagaagttcgagatctggtacaacgcgcgcgaggaggtctacatcgtccaggcgccaactcctgagattaaagccgcgtgggtgaatgaaattcggaaagtgctgaccagccagctgcaggcttgtagagaagccagccagcaccgggcgctggagcagtcacagagcctgcccctgccggccccgaccagcaccagtccctcaagaggaaactcaaggaacatcaagaagctggaagaaaggaaaacagaccccctaagcctggagggatacgtcagctcagcgccactgacaaagccccccgaaaagggcaaaggttggagcaaaacgtcccactcactggaggcacctgaggacgacgggggctggtcaagtgcagaggagcagattaactcgtccgacgcagaggaggacggcgggttgggccccaagaagctggttccaggtaaatacacggtcgtggcggaccacgagaagggaggccccgatgcgctgcgcgtgaggagcggggacgtggtggagctggtgcaggagggcgacgagggcctctggtaa

SEQ ID NO: 225 - DNA, 2490 bp, Homo sapiens
atgggctgtgccccgagcatccacatttccgagcgcctggtggccgaggacgcgcctagccccgcggcaccgccgctgtcgtccggcgggccgcgcctcccgcagggccagaagacggccgccttgccccggacccgcggcgccggcctcttggagtcggagcttcgcgacggcagcggcaagaaggtagcagtagctgatgtgcagtttggccccatgagatttcatcaagatcaacttcaggtacttttagtgtttaccaaagaagataaccaatgtaatggattctgcagggcatgtgaaaaagcagggtttaagtgtacagttaccaaggaggctcaggctgtccttgcctgtttcctggacaaacatcatgacattatcatcatagaccacagaaatcctcgacagctggatgcagaggcactgtgcaggtctatcagatcatcaaaactctcagaaaacacagttattgttggtgtagtacgcagggtggatagagaagagttgtccgtaatgcctttcatttctgctggatttacaaggaggtatgtagaaaaccccaacatcatggcctgctacaatgaactgctccagctggagtttggagaggtgcgatcacaactgaaactcagggcttgtaactcagtattcactgcattagaaaacagtgaagatgcaattgaaattacaagcgaagaccgttttatacagtatgcaaatcctgcatttgaaacaacaatgggctatcagtcaggtgaattaatagggaaggagttaggagaagtgcctataaatgaaaaaaaggctgacttgctcgatactataaattcatgcatcaggataggcaaggagtggcaaggaatttactatgccaaaaagaaaaacggagataatatacaacaaaatgtgaagataatacctgtcattggacagggaggaaaaattagacactatgtgtccattatcagagtgtgcaatggcaacaataaggctgagaaaatatccgaatgtgttcagtctgacactcatacagataatcagacaggcaaacataaagacaggagaaaaggctcactagacgtcaaagctgttgcctcccgtgcaactgaagtttccagccagagacgacactcttccatggcccggatacattccatgacaattgaggcgcccatcaccaaggtaatcaatattatcaatgctgcccaggaaagtagtcccatgcctgtgacagaagccctagaccgtgtgctggaaattctaagaaccactgagttatattcaccacagtttggtgctaaagatgatgatccccatgccaatgaccttgttgggggcttaatgtctgatggtttgcgaagactatcagggaatgaatatgttctttcaacaaaaaacactcaaatggtttcaagcaatataatcactcccatctcccttgatgatgtcccaccacggatagctcgggccatggaaaatgaggaatactgggactttgatatttttgaactggaggctgccacccacaataggcctttgatttatcttggtctcaaaatgtttgctcgctttggaatctgtgaattcttacactgctccgagtcaacgctaagatcatggttacaaattatcgaagccaattatcattcctccaatccctaccacaattctacacattctgctgatgtgcttcatgccactgcctattttctctccaaggagaggataaaggaaactttagatccaattgatgaggtcgctgcactcatcgcagccaccattcatgatgtggatcaccctgggagaaccaactccttcctgtgtaatgctggaagtgagctggccattttgtacaatgacactgctgtgctggagagccaccatgcggccttggccttccagctgaccactggagatgataaatgcaatatatttaaaaacatggagaggaatgattatcggacactgcgccaggggattatcgacatggtcttagccacagaaatgacaaagcactttgagcatgtcaacaaatttgtcaacagcatcaacaaacccttggcaacactagaagaaaatggggaaactgataaaaaccaggaagtgataaacactatgcttaggactccagagaaccggaccctaatcaaacgaatgctgattaaatgtgctgatgtgtccaatccctgccgacccctgcagtactgcatcgagtgggctgcacgcatttcggaagaatatttttctcagactgatgaagagaagcagcagggcttacctgtggtgatgccagtgtttgacagaaatacctgcagcatccccaaatcccaaatctctttcattgattacttcatcacagacatgtttgatgcttgggatgcctttgtagacctgcctgatttaatgcagcatcttgacaacaactttaaatactggaaaggactggacgaaatgaagctgcggaacctccgaccacctcctgaatag

SEQ ID NO: 226 - DNA, 4143 bp, Homo sapiens
gtcaaaatgagtctgctgatgtttacacaactactgctctgtggatttttatatgttcgggttgatggatcgcgtcttcgccaggaggactttcccccgcggattgtggagcatccttccgatgtcatcgtctctaagggcgagcccacgactctgaactgcaaggcggagggccggccaacgcccaccattgagtggtacaaagatggggagcgagtggagactgacaaggacgatccccggtcccacaggatgcttctgcccagcggatccttattcttcttgcgcatcgtgcacgggcgcaggagtaaacctgatgaaggaagctacgtttgtgttgcgaggaactatcttggtgaagcagtgagtcgaaatgcgtctctggaagtggcattgttacgagatgacttccgacaaaaccccacagatgttgtagtggcagctggagagcctgcaatcctggagtgccagcctccccggggacacccagaacccaccatctactggaaaaaagacaaagttcgaattgatgacaaggaagaaagaataagtatccgtggtggaaaactgatgatctccaataccaggaaaagtgatgcagggatgtatacttgtgttggtaccaatatggtgggagaaagggacagtgacccagcagagctgactgtctttgaacgacccacatttctcaggaggccaattaaccaggtggtactggaggaagaagctgtagaatttcgttgtcaagtccaaggagatcctcaaccaactgtgaggtggaaaaaggatgatgcagacttgccaagaggaaggtatgacatcaaagacgattacacactaagaattaaaaagaccatgagtacagatgaaggcacctatatgtgtattgctgagaatcgggttggaaaaatggaagcctctgctacactcaccgtccgagctcccccacagtttgtggttcggccaagagatcagattgttgctcaaggtcgaacagtgacatttccctgtgaaactaaaggaaacccacagccagctgttttttggcagaaagaaggcagccagaacctacttttcccaaaccaaccccagcagcccaacagtagatgctcagtgtcaccaactggagacctcacaatcaccaacattcaacgttccgacgcgggttactacatctgccaggctttaactgtggcaggaagcattttagcaaaagctcaactggaggttactgatgttttgacagatagacctccacctataattctacaaggcccagccaaccaaacgctggcagtggatggtacagcgttactgaaatgtaaagccactggtgatcctcttcctgtaattagctggttaaaggagggatttacttttccgggtagagatccaagagcaacaattcaagagcaaggcacactgcagattaagaatttacggatttctgatactggcacttatacttgtgtggctacaagttcaagtggagagacttcctggagtgcagtgctggatgtgacagagtctggagcaacaatcagtaaaaactatgatttaagtgacctgccagggccaccatccaaaccgcaggtcactgatgttactaagaacagtgtcaccttgtcctggcagccaggtacccctggaacccttccagcaagtgcatatatcattgaggctttcagccaatcagtgagcaacagctggcagaccgtggcaaaccatgtaaagaccaccctctatactgtaagaggactgcggcccaatacaatctacttattcatggtcagagcgatcaacccccaaggtctcagtgacccaagtcccatgtcagatcctgtgcgcacacaagatatcagcccaccagcacaaggagtggaccacaggcaagtgcagaaagagctaggagatgtccttgtccgtcttcataatccagttgtgctgactcccaccacggttcaggtcacatggacggttgatcgccaaccccagtttatccaaggctaccgagtgatgtatcgtcagacttcaggtctgcaggcgacatcttcgtggcagaatttagatgccaaagtcccgactgaacgaagtgctgtcttagtcaacctgaaaaagggggtgacttatgaaattaaagtacggccatattttaatgagttccaaggaatggatagtgaatctaaaacggttcgtactactgaagaagccccaagtgccccaccacagtctgtcactgtactgacagttggaagctacaatagcacaagtattagtgtttcctgggatcctcctcctccagatcaccagaatggaattatccaagaatacaagatctggtgtctaggaaatgaaacgcgattccatatcaacaaaactgtggatgcagccattcggtccgtaataattggtggattattcccaggtattcaataccgggtagaggttgcagctagtaccagtgcaggggttggagtaaagagtgagccacagccaataataatcgggagacgcaatgaagttgtcattactgaaaacaataacagcataactgagcaaatcactgatgtggtgaagcaaccagcctttatagctggtattggtggtgcctgctgggtaattctgatgggttttagcatatggttgtattggcgaagaaagaagaggaagggactcagtaattatgctgttacgtttcaaagaggagatggaggactaatgagcaatggaagccgtccaggtcttctcaatgctggtgatcccagctatccatggcttgctgattcttggccagccacgagcttgccagtaaataatagcaacagtggcccaaatgagattggaaattttggccgtggagatgtgctgccaccagttccaggccaaggggataaaacagcaacgatgctctcagatggagccatttatagtagcattgacttcactaccaaaaccagttacaacagttccagccaaataacacaggctaccccatatgccacgacacagatcttgcattccaacagcatacatgaattggctgtcgatctgcctgatccacaatggaaaagctcaattcagcaaaaaacagatctgatgggatttggttattctctacctgatcagaacaaaggtaacaatggtgggaaaggtggaaaaaagaagaaaaataaaaactcttctaaaccacagaaaaacaatggatccacttgggccaatgtccctctacctccccccccagtccagccccttcctggcacggagctggaacactatgcagtggaacaacaagaaaatggctatgacagtgatagctggtgcccaccattgccagtacaaacttacttacaccaaggtctggaagatgaactggaagaagatgatgatagggtcccaacacctcctgttcgaggcgtggcttcttctcctgctatctcctttggacagcagtccactgcaactcttactccatccccacgggaagagatgcaacccatgctgcaggctcacctggatgagttgacaagagcctatcagtttgatatagcaaaacaaacatggcacattcaaagcaataatcaacctccacagcctccagttccaccgttaggttatgtgtctggagccttgatttctgatttggaaacggatgttgcagatgatgatgccgacgacgaagaggaagctttagaaatccccaggcccctgagagcactggaccagactcctggatccagcatggacaatctagacagctctgtgacaggaaaagcctttacctcctctcaaagacctcgacctaccagcccattttctactgacagtaacaccagtgcagccctgagtcaaagtcagaggcctcggcccactaaaaaacacaagggagggcggatggaccaacaaccagcattgcctcatcgaagggaaggaatgacagatgaggaggccttggtgccctatagcaagcccagtttcccatctccaggtggccacagctcatcaggaacagcttcttctaagggatccactggacctaggaaaaccgaggtgttgagagcaggccaccagcgcaatgccagcgaccttcttgacataggatatatgggctccaacagtcaaggacagtttacaggtgaattatag

SEQ ID NO: 227 - DNA, 2412 bp, Homo sapiens
atggccaagcgcagctcgctgtacatccgcatcgtggaggggaagaaccttcccgccaaggacatcactggcagcagcgacccctactgcatcgtgaaggtggacaatgagcccatcatcaggacagccacagtgtggaagaccctgtgccccttctggggtgaggagtaccaagtgcacctgccgcccaccttccacgctgtggctttctatgtcatggatgaggatgccctcagccgggacgacgttatcggaaaggtctgccttacaagggacaccatagcctctcaccctaagggtttcagcgggtgggcccacctgacagaggtcgaccccgacgaggaggtgcagggcgagatccacctgcggctggaagtgtggccaggggcccgggcctgccggctacgctgctctgtgctggaggccagggatctggccccaaaggaccgcaatggcacatctgaccccttcgtccgagtgcgctacaagggccggacacgggagacctcgatcgtgaagaagtcatgctacccacgctggaatgagacgtttgaatttgagctgcaggagggggccatggaggcgctgtgcgtggaggcctgggactgggaccttgtcagccgaaacgacttcctgggcaaagtggtgattgatgtccagagactgcgggtggtgcagcaggaggagggctggttccggctgcagcccgaccagtccaagagccggcggcatgacgagggcaacctgggctccttgcagctggaggtgcggctgcgggacgagacggtgctgccctccagctactaccagccactggtgcacctgctgtgccacgaggtcaagctgggcatgcagggcccagggcagctgatcccactcatcgaggagacaaccagcaccgagtgtcgccaggacgtggccacgaacctgctcaagctcttcctggggcaggggctggccaaggacttcctggacctgctcttccagctggagctgagtcgcaccagtgagaccaacaccctgttccggagcaactctctggcctcaaagtccgtggagtcttttctgaaggtggccgggatgcagtacctgcacggcgtcctgggccccatcatcaacaaggtgtttgaggagaagaagtacgtggagctggaccccagcaaagtggaagttaaggatgtagggtgctccgggctgcaccgcccgcagaccgaggccgaggtgctggagcagagcgcgcagacgctgcgcgcccacctgggggccctgctgagcgcgctcagccgctcggttcgcgcgtgccccgccgtggtgcgcgccaccttccgccagctcttccggcgcgtgcgcgagcgcttccccggcgcccagcacgagaatgtaccgttcatcgccgtcaccagcttcctgtgcctgcgcttcttctctcccgccatcatgtcgcccaagctcttccacctgcgggagcgccacgcggacgcccgcaccagccgcaccctgctcctgttggccaaggcagtccagaacgtgggcaacatggacacgccggcttccagggccaaggaggcttggatggagccgctgcagcccaccgtgcaccagggcgtggcgcagctgaaggacttcatcaccaagctcgtggacatcgaggagaaggacgagctggacctgcagcggacgctgagtttgcaggcgccacctgtgaaggaggggccactcttcatccacaggaccaagggcaagggccccctcatgtcctcctccttcaagaagctctacttctccctcactaccgaggccctcagcttcgcgaagacgcccagctccaagaaaagcgccctcatcaagttagccaacatccgggcagcggaaaaggttgaggaaaagagctttggcggctcgcacgtcatgcaggtcatctacacggacgacgccggcaggccccagactgcctacctgcagtgcaagtgtgtgaatgagcttaaccagtggctgtctgcgctgcggaaggtgagcatcaacaacaccggactgctgggctcctaccaccctggcgtcttccgtggggacaagtggagctgctgccaccaaaaagagaagacaggtcagggctgcgataagacccggtcacgggtgaccctgcaggagtggaatgaccctcttgaccatgaccttgaggcccagctcatctaccggcacctgctgggcgtggaggccatgctgtgggagaggcaccgggagctgagcgggggcgcagaggcaggcacggtgcccacgagccctggcaaagtccccgaggactcattggcccggctgctccgggtgctgcaggacctccgcgaggcccatagctccagcccggccggctccccaccctcagagcccaactgcctcctggagctgcagacgtga

SEQ ID NO: 228 - DNA, 1782 bp, Homo sapiens
atgcctcgaacactaagtttacatgaaataactgaccttttagagacagatgacagcatagaagcaagtgctatagtgatacaaccacctgaaaatgctacagcacctgtttctgatgaggaatcaggagatgaagaaggtggaacaataaataatctgccaggttctttgttgcacacagctgcgtatcttattcaagatggctctgatgctgagtctgactcagatgatccctcatacgcacctaaagatgactctcctgatgaagttccatctacgtttactgtgcagcaacctccaccatcaaggaggaggaaaatgacaaaaattctttgcaaatggaaaaaagccgacctaactgtacaacccgtagcaggtagagttacagcaccaccaaacgatttcttcaccgtaatgagaactcccacagaaattcttgaactttttcttgatgacgaggtcattgaactcattgtcaagtactccaacttatatgcttgcagtaaaggtgtacatcttggcttgactagctctgaattcaaatgttttctgggaattatttttctgagtggttatgtctcagttcctagaaggcgtatgttttgggaacaaagaacagatgtgcataatgtactggttagtgctgccatgagacgtgaccggtttgaaactatattttctaatttgcatgttgctgacaatgcaaatttggatccagtggacaaattttccaaattgcgacctctcataagcaaacttaatgagagatgcatgaaatttgttccaaatgaaacatatttcagctttgatgaattcatggttccttattttggtcgtcacgggtgcaaacaatttattcggggaaagcccattcggtttggctataagttttggtgtggtgccacctgtctgggctacatttgctggtttcagccgtatcagggtaaaaacccaaatactaaacatgaggaatatggtgtcggtgcgtcacttgtccttcagtttagtgaggcacttacagaggcacaccctggacaataccattttgtattcaataactttttcaccagtattgcacttcttgataagctcagttcaatgggacatcaggcaacaggtacagtgagaaaggatcacattgacagagttccactggaatcagatgtagctttaaagaaaaaagaaagaggcacatttgattatcgaattgatggcaaaggcaatattgtctgcagatggaatgataacagtgttgtcactgttgcctcatctggtgctggtatccatcccctgtgtcttgtcagtcgttactcccagaaactgaaaaagaagatacaagttcagcagccaaacatgatcaaagtgtataaccagttcatgggaggcgtagacagagctgatgaaaacattgataagtatcgggcatcaatccgtggaaagaaatggtattcaagccctcttttgttctgtttcgaactggtcttacaaaatgcttggcaattgcataaaacatatgatgagaaaccagtggattttctggagtttcgtcgacgtgtggtatgccattatctggagacccatggtcatcctccagaacctggccaaaaaggaagacctcagaagcgtaacattgactcacgttatgatggcataaatcatgtgatagtcaaacagggaaagcaaacgcgatgcgctgaatgtcataagaacacaacttttcgatgtgaaaaatgtgatgttgccttacatgtgaagtgttccgttgaatatcacactgaatag

SEQ ID NO: 229 - DNA, 2412 bp, Homo sapiens
atggccaagcgcagctcgctgtacatccgcatcgtggaggggaagaaccttcccgccaaggacatcactggcagcagcgacccctactgcatcgtgaaggtggacaatgagcccatcatcaggacagccacagtgtggaagaccctgtgccccttctggggtgaggagtaccaagtgcacctgccgcccaccttccacgctgtggctttctatgtcatggatgaggatgccctcagccgggacgacgttatcggaaaggtctgccttacaagggacaccatagcctctcaccctaagggtttcagcgggtgggcccacctgacggaggtcgaccccgatgaggaggtgcagggcgagatccacctgcggctggaagtgtggccaggggcccgggcctgccggctacgctgctctgtgctggaggccagggatctggccccaaaggaccgcaatggcacatctgaccccttcgtccgagtgcgctacaagggccggacacgggagacctcgatcgtgaagaagtcatgctacccacgctggaatgagacgtttgaatttgagctgcaggagggggccatggaggcgctgtgcgtggaggcctgggactgggacctcgtcagccgaaacgacttcctgggcaaagtggtgattgatgtccagagactgcgggtggtgcagcaggaggagggctggttccggctgcagcccgaccagtccaagagccggcggcatgacgagggcaacctgggctccttgcagctggaggtgcggctgcgggacgagacggtgctgccctccagctactaccagccactggtgcacctgctgtgccacgaggtcaagctgggcatgcagggcccagggcagctgatcccactcatcgaggagacaaccagcaccgagtgtcgccaggacgtggccacgaacctgctcaagctcttcctggggcaggggctggccaaggacttcctggacctgctcttccagctggagctgagtcgcaccagtgagaccaacaccctgttccggagcaactctctggcctcaaagtccatggagtcttttctgaaggtggccgggatgcagtacctgcacggcgtcctgggccccatcatcaacaaggtgtttgaggagaagaagtacgtggagctggaccccagcaaagtggaagttaaggatgtagggtgctccgggctgcaccgcccgcagaccgaggccgaggtgctggagcagagcgcgcagacgctgcgcgcccacctgggggccctgctgagcgcgctcagccgctcggttcgcgcgtgccccgccgtggtgcgcgccaccttccgccagctcttccggcgcgtgcgcgagcgcttccccggcgcccagcacgagaatgtaccgttcatcgccgtcaccagcttcctgtgcctgcgcttcttctctcccgccatcatgtcgcccaagctcttccacctgcgggagcgccacgcggacgcccgcaccagccgcaccctgctcctgttggccaaggcagtccagaacgtgggcaacatggacacgccggcttccagggccaaggaggcttggatggagccgctgcagcccaccgtgcgccagggcgtggcgcagctgaaggacttcatcaccaagctcgtggacatcgaggagaaggacgagctggacctgcagcggacgctgagtttgcaggcgccacctgtgaaggaggggccactcttcatccacaggaccaagggcaagggccccctcatgtcctcctccttcaagaagctctacttctccctcactaccgaggccctcagcttcgcgaagacgcccagctccaagaaaagcgccctcatcaagttagccaacatccgggcagcggaaaaggttgaggaaaagagctttggcggctcgcacgtcatgcaggtcatctacacggacgacgccggcaggccccagactgcctacctgcagtgcaagtgtgtgaatgagcttaaccagtggctgtctgcgctgcggaaggtgagcatcaacaacaccggactgctgggctcctaccaccctggcgtcttccgtggggacaagtggagctgctgccaccaaaaagagaagacaggtcagggctgcgataagacccggtcacgggtgaccctgcaggagtggaatgaccctcttgaccatgaccttgaggcccagctcatctgccggcacctgctgggcgtggaggccatgctgtgggagaggcaccgggagctgagcgggggcgcagaggcaggcacggtgcccacgagccctggcaaagtccccgaggactcattggcccggctgctccgggtgctgcaggacctccgcgaggcccatagctccagcccggccggctccccaccctcagagcccaactgcctcctggagctgcagacgtga

SEQ ID NO: 230 - DNA, 1041 bp, Homo sapiens
atggcccggccgcagaggactccggcgcgcagtcccgatagcatcgtcgaggtgaagagcaaatttgacgccgagttccgacgcttcgcgctgcctcgcgcttcggtgagcggcttccaggagttctcgcggttgctgcgggcggtgcaccagatcccgggcctggacgtgctacttggctatacggatgctcatggcgacctgctgcccctcaccaacgacgacagcctgcaccgggccctggccagcgggcccccgccactgcgcctactggtgcagaagcgggcagaagctgactccagcggcctggcttttgcctccaactctctgcagcggcgcaagaaagggctcttgctgcggccagtggcacccctgcgcacccggccacccttgctaatcagcctgccccaagatttccgccaggtttcctcagtcatagacgtggacctactgcctgagacccaccgacgggtgcggctgcacaagcatggttcagaccgccccctgggcttctacatccgagatggcatgagcgtgcgtgtggctccccagggcctggagcgggttccaggaatcttcatctcccgcctggtacgtgggggtctggctgagagtacagggctgctggcggtcagtgatgagatcctcgaggtcaatggcattgaagtagccgggaagaccttggaccaagtgacggacatgatggttgccaacagccataacctcattgtcactgtcaagcccgccaaccagcgcaataacgtggtgcgaggggcatctgggcgtttgacaggtcctccctctgcagggcctgggcctgctgagcctgatagtgacgatgacagcagtgacctggtcattgagaaccgccagcctcccagttccaatgggctgtctcaggggcccccgtgctgggacctgcaccctggctgccgacatcctggtacccgcagctctctgccctccctggatgaccaggagcaggccagttctggctgggggagtcgcattcgaggagatggtagtggcttcagcctctga

SEQ ID NO: 231 - DNA, 657 bp, Homo sapiens
atggggaggctgctggccttagtggtcggcgcggcactggtgtcctcagcctgcgggggctgcgtggaggtggactcggagaccgaggccgtgtatgggatgaccttcaaaattctttgcatctcctgcaagcgccgcagcgagaccaacgctgagaccttcaccgagtggaccttccgccagaagggcactgaggagtttgtcaagatcctgcgctatgagaatgaggtgttgcagctggaggaggatgagcgcttcgagggccgcgtggtgtggaatggcagccggggcaccaaagacctgcaggatctgtctatcttcatcaccaatgtcacctacaaccactcgggcgactacgagtgccacgtctaccgcctgctcttcttcgaaaactacgagcacaacaccagcgtcgtcaagaagatccacattgaggtagtggacaaagccaacagagacatggcatccatcgtgtctgagatcatgatgtatgtgctcattgtggtgttgaccatatggctcgtggcagagatgatttactgctacaagaagatcgctgccgccacggagactgctgcacaggagaatgcctcggaatacctggccatcacctctgaaagcaaagagaactgcacgggcgtccaggtggccgaatag

SEQ ID NO: 232 - DNA, 1338 bp, Homo sapiens
atggatttagagctcgacgagtattataacaagacacttgccacagagaataatactgctgccactcggaattctgatttcccagtctgggatgactataaaagcagtgtagatgacttacagtattttctgattgggctctatacatttgtaagtcttcttggctttatggggaatctacttattttaatggctctcatgaaaaagcgtaatcagaagactacggtaaacttcctcataggcaatctggccttttctgatatcttggttgtgctgttttgctcacctttcacactgacgtctgtcttgctggatcagtggatgtttggcaaagtcatgtgccatattatgccttttcttcaatgtgtgtcagttttggtttcaactttaattttaatatcaattgccattgtcaggtatcatatgataaaacatcccatatctaataatttaacagcaaaccatggctactttctgatagctactgtctggacactaggttttgccatctgttctccccttccagtgtttcacagtcttgtggaacttcaagaaacatttggttcagcattgctgagcagcaggtatttatgtgttgagtcatggccatctgattcatacagaattgcctttactatctctttattgctagttcagtatattctgcccttagtttgtcttactgtaagtcatacaagtgtctgcagaagtataagctgtggattgtccaacaaagaaaacagacttgaagaaaatgagatgatcaacttaactcttcatccatccaaaaagagtgggcctcaggtgaaactctctggcagccataaatggagttattcattcatcaaaaaacacagaagaagatatagcaagaagacagcatgtgtgttacctgctccagaaagaccttctcaagagaaccactccagaatacttccagaaaactttggctctgtaagaagtcagctctcttcatccagtaagttcataccaggggtccccacttgctttgagataaaacctgaagaaaattcagatgttcatgaattgagagtaaaacgttctgttacaagaataaaaaagagatctcgaagtgttttctacagactgaccatactgatattagtatttgctgttagttggatgccactacaccttttccatgtggtaactgattttaatgacaatcttatttcaaataggcatttcaagttggtgtattgcatttgtcatttgttgggcatgatgtcctgttgtcttaatccaattctatatgggtttcttaataatgggattaaagctgatttagtgtcccttatacactgtcttcatatgtaa

SEQ ID NO: 233 - DNA, 864 bp, Homo sapiens
atggaagtaatggaaggacccctcaacctggctcatcaacagagcagacgagcagaccgtttattagctgcaggcaaatacgaagaggctatttcttgtcacaaaaaggctgcagcatatctttctgaagccatgaagctgacacagtcagagcaggctcatctttcactggaattgcaaagggatagccatatgaaacagctcctcctcatccaagagagatggaaaagggcccagcgtgaagaaagattgaaagcccagcagaacacagacaaggatgcagctgcccatcttcagacatctcacaaaccctctgcagaggatgcagagggccagagtcccctttctcagaagtacagcccttccacagagaaatgcctgcctgagattcaggggatctttgacagggatccagacacactactttatttacttcagcaaaagagtgagccagcagagccatgtattggaagcaaagccccaaaagatgataaaacaattatagaggagcaggcaaccaaaattgcagatttgaagaggcatgtggaattccttgtggctgagaatgaaagattaaggaaagaaaataaacaactaaaggctgaaaaggccagacttctaaaaggtccaatagaaaaggagctggatgtagatgctgattttgtagaaacgtcagagttatggagcttgccaccacatgcagaaactgctacagcctcctcaacctggcagaagttcgcagcaaatactgggaaagccaaggacattccaatccccaatcttcctcccttggattttccatctccagaacttcctcttatggagctctctgaggatattctgaaaggatttatgaataattaa

SEQ ID NO: 234 - DNA, 2394 bp, Homo sapiens
atggtgtttaccccggaggatagattgggaaagcaatgtctgctcctcccgcttctgctcctcgcagcctggaaggtggggagcggccagctccactactccgtacccgaggaggccaaacacggcaccttcgtgggccggatcgcgcaggacctggggctggagctggcggagctggtgccgcgcctgttcaggatggcctccaaagaccgcgaggaccttctggaggtaaatctgcagaatggcattttgtttgtgaattctcggatcgaccgcgaggagctgtgcgggcggagcgcggagtgcagcatccacctggaggtgatcgtggacaggccgctgcaggttttccatgtggacgtggaggtgagggacattaacgacaacccgcccttgttcccggtagaggaacaaagagtgctgatttacgaatctaggctgccagattctgtgtttccactggagggcgcgtccgatgcagatgttggctcaaattccatcttaacctataaactcagttctagcgaatacttcgggctagatgtgaaaataaacagtgatgacaataaacaaattgggctcttattaaagaaatccttggacagagaggaagctcctgcacacaacttattcctgacagccacagatgggggcaaacctgagctcacaggcactgttcagctgctggtcacagtgctggatgtgaatgataatgctcccactttcgaacagtctgaatacgaagtaagaatattcgaaaatgcagacaacggaacaacagttatcagactgaatgcttctgatcgggatgaaggagcgaatggggcaatttcatattcttttaatagccttgttgcagccatggttattgaccactttagcatagatcgaaatacgggagaaatagtgattcggggtaatttggattttgaacaagaaaacttatacaaaatcctcattgacgccacggacaaaggccatcctcccatggcgggtcattgcaccgttttagtgagaattttggataaaaatgataacgtccctgagatagcactgacttccttatccttgcctgtacgtgaagacgctcaatttggtactgtcatcgccctaattagcgtgaacgacctcgattcaggtgccaacgggcaggtgaactgctcgctgacgcctcacgtccctttcaagctggtgtccaccttcaagaattactactcgttggtgctggacagtgccctggaccgcgagagcgtgtcggcctatgagttggtggtaaccgcgcgggacgggggctcgccttcgctgtgggccaccgccagcttgtctgtggaggtggccgacatgaatgacaatgctccggcgttcgcgcagcccgagtacacagtgttcgtgaaggagaacaacccgccgggctgccacatcttcacggtgtctgcgcgagacgcggacgcgcaggagaacgcgctggtgtcctactcgctggtggagcggcgggtgggcgagcgcgcgttgtcgagctacatttcggtgcacgcggagagcggcaaggtgtacgcgctgcagccgctggaccacgaggagctagagctgctgcagtttcaggtgagcgcgcgcgacgcgggcgtgccgcctctgggcagcaacgtgacgctgcaggtgttcgtgctggacgagaacgacaacgcgccggcgctgctggcgcctcgggtgggtggtactggtggtgcagtgagcgagctggtgccgcggtcactgggtgcaggccaagtggtggcgaaggtgcgcgcagttgacgccgactcaggctacaacgcgtggctttcgtatgagctgcagcccccggcaagcagcgctcgcttcccgtttcgcgtggggctgtacacgggcgagatcagcaccactcgtgtcctggacgaagcggactctccgcgccaccggctgctggtgctggtgaaagaccacggtgagccggcgctgacagcgacggccacggttctggtgtcgctggtggagagtggccaggctccaaaggcgtcatcacgggcgtcggtgggcgccgcgggcccagaggcggcgctggtggatgtcaacgtgtacctgatcatcgccatctgcgcggtatccagcctgctggtcctcacgctactgctgtacacagcgctgcggtgctcggcgccacccaccgagggcgcgtgcacggcggacaagcccacgctggtgtgctccagcgcagtggggagctggtcgtactcgcagcagaggcggcagagggtgtgctccggggagggcccacccaagatggatctcatggcctttagccccagcctttcaccttgtcctattatgatgggtaaggcggagaatcaggatttaaatgaagatcatgatgccaaa

SEQ ID NO: 235 - DNA, 2391 bp, Homo sapiens
atggaggcgggaggagagcgatttcttagacaaaggcaagtcttgcttctctttgtttttctgggagggtctctggctgggtccgagtcaagacgctattctgtggctgaggaaaaagagaagggctttttaatagccaacctagcaaaggatctgggactaagggtagaggaactggccgcgaggggggcccaagttgtgtccaaagggaacaaacagcattttcagctcagtcatcagacaggtgatttgctcctgaatgagaaattggaccgggaggagctatgcggccccacagaaccatgcatactacattttcagatattactgcaaaaccctttgcaattcgttacaaacgagctccgtatcatagatgtaaatgaccattctccggtattctttgaaaatgaaatgcatctgaaaatcctagaaagcactctgccaggaacagtaattcctttgggaaatgctgaggacttggatgtgggaagaaacagcctccaaaactacactatcactccgaattcccacttccacgtactcactcgcagtcgtagggacggaaggaagtacccggaactagtactggataaagcgctcgatcgggaggagcagccggaactcagcttaacgctcaccgcgctggacggcggctctccccctcggtctgggacagcccagataaacatccaggtcttagatataaacgacaatgcaccagaatttgcacagccgctctatgaggttgcagttctagagaatacccccgttaactctgtcattgtcactgtctcggcttctgacttagatacaggaagttttgggacaatatcatatgcattttttcatgcttctgaagaaattcgcaaaacttttcagctaaatccaattactggtgatatgcaactggtcaaatatttgaattttgaagcgattaatagttatgaagtcgacatcgaggccaaggatggcggaggcctatccggaaagtctacagtcatagtccaggtggttgatgtcaacgacaacccaccggaactgaccttgtcttcagtaaacagccctattcctgagaactcgggagagactgtactggctgttttcagtgtttctgatctagactctggagacaacggaagagtgatgtgttccattgagaacaatctccccttcttcctgaaaccatctgtagagaatttttacaccctagtgtcagaaggcgcgctggacagagagaccagatccgagtacaacattaccatcactatcactgacctggggacacccaggctgaaaaccaagtacaacataaccgtgctggtctccgacgtcaatgacaacgcccccgccttcacccaaatctcctacaccctgttcgtccgcgagaacaacagccccgccctgcacatcggcagtgtcagcgccacagacagagactcaggcaccaacgcccaggtaacctactcgctgctgccgccccaggacccgcacctgcccctctcttccctggtctccatcaacgcggacaacggccacctgtttgccctcaggtcgctggactacgaggccctgcaggcgttcgagttccgcgtgggcgccacagaccgtggctccccggctttgagcagcgaggcgctggtgcgcgtgctggtgctggacgccaacgacaactcgcccttcgtgctgtacccgctgcagaacggctccgcgccctgcaccgagctggtgccccgggcggctgagccgggctacctggtgaccaaggtggtggcggtggacggcgactcgggccagaacgcctggctgtcgtaccagctgctcaaggccacggagcccgggctgttcggcgtgtgggcgcacaatggcgaagtgcgcaccgccaggctgctgagcgagcgcgacgcggccaagcacaggctggtggtgctggtcaaggacaatggcgagcctccgcgctcggccaccgccacgctgcatgtgctcctggtggacggcttctcccagccctacctgcctctcccggaggcggcaccggcccaggcccaggccgacttgctcaccgtctacctggtggtggcattggcctcggtgtcttcgctcttcctcttttcggtgctcctgttcgtggcggtgcggctgtgcaggaggagcagggcggcctcggtgggtcgctgctcggtgcccgagggcccctttccagggcagatggtggacgtgagcggcaccgggaccctgtcccagagctaccagtacgaggtgtgtctgactggaggctccgggacaaatgagttcaagttcctgaagccaattatccccaacttcgttgctcagggtgcagagagggttagcgaggcaaatcccagtttcaggaagagctttgaattcagttaa

SEQ ID NO: 236 - DNA, 513 bp, Homo sapiens
atgatggcaggaatgaaaatccagcttgtatgcatgctactcctggctttcagctcctggagtctgtgctcagattcagaagaggaaatgaaagcattagaagcagatttcttgaccaatatgcatacatcaaagattagtaaagcacatgttccctcttggaagatgactctgctaaatgtttgcagtcttgtaaataatttgaacagcccagctgaggaaacaggagaagttcatgaagaggagcttgttgcaagaaggaaacttcctactgctttagatggctttagcttggaagcaatgttgacaatataccagctccacaaaatctgtcacagcagggcttttcaacactgggagttaatccaggaagatattcttgatactggaaatgacaaaaatggaaaggaagaagtcataaagagaaaaattccttatattctgaaacggcagctgtatgagaataaacccagaagaccctacatactcaaaagagattcttactattactga

SEQ ID NO: 237 - DNA, 3969 bp, Homo sapiens
atggcttggatgacttacatttcaaattggtttgagcaagatgattggtatgaaggactacaaagagcaaacatgtcccaggtaaggcaagtgggattgctggctgctggatgtcagccatggaacaaggatgtatgtgctgccagtggagacaggtttgcatattgtgcgaccctggctatctatatttatcagttggatcaccgttataatgaattcaaacttcacgcaattatgtctgaacataaaaaaacaatcacagcaatttcttggtgtccacataatcctgatctgtttgcaagtggcagtactgataatttagtgatcatttggaatgttgcagaacaaaaagtcattgctaaactcgacagtacaaaagggatccctgcttctcttagttggtgctggaatgcagaggatgtggtggcatttgtttcccacagaggcccactgttcatttggaccatctcaggaccagatagtggagtgattgtacacaaagatgctcatagcttcttgtctgatatctgtatgttcagatggcatacacaccaaaaggggaaagttgtgtttggtcatattgatggaagtctatcaatttttcatccaggtaataaaaatcagaaacatgttttgagaccagaatctcttgaagggacagatgaagaggatccagttacggccttggaatgggacccactatctactgattatcttctagtggttaatttgcattatggaattcgcctggtagattctgaatcactttcttgcataacaacatttaatcttcccagtgcagcagcttctgtacagtgcttagcctgggttcccagtgctcctgggatgtttataactggagattctcaagtgggtgttttacgcatttggaatgtttcaagaacaacacctattgataatcttaaattaaagaaaacaggatttcactgcttacatgtacttaattctcctccaagaaaaaagttttcagtccaatctccaaccaaaaatcattatacatcctcaacaagcgaagcagttccacccccaactttaacacagaatcaagcattttctcttcctcctggtcatgcagtgtgttgtttcttggatggtggagttggactttatgatatgggagctaagaagtgggattttcttagagacttgggacatgtggaaactatctttgactgcaaattcaaacctgacgatcctaatcttttagcaacagcttcatttgatggcactataaaagtctgggatataaacacattaacagcagtgtacacatccccgggtaatgaaggtgttatttattccctttcttgggctccaggtggtttaaattgtattgctgggggaacttcccgaaatggtgcttttatttggaatgttcaaaagggcaaaattatacaacgatttaatgagcatggaacaaatggaatattctgcattgcctggagtcataaagattctaaaagaatagcaacctgcagcagtgatggtttctgtattattcgaacaattgatggtaaagtgctacacaaatataaacatccagctgcagtgtttggttgtgattggagccaaaacaataaagacatgatagccactggctgtgaagacacaaatgttcgtgtttattatgtagccaccagctcagatcaaccattgaaagtatttagtgggcatacagcaaaagtgtttcatgttaaatggtctcctctgagagagggaattctttgcagtggttctgatgatggtaccgttcgaatctgggattatactcaggatgcttgcatcaatattcttaatggacacactgcacctgtgagaggattaatgtggaatactgagattccatatctgctcatatctggcagctgggactatactataaaagtatgggacactcgagaaggaacttgtgtggatactgtgtatgatcacggtgcagatgtatatggtttaacctgccatcccagtcgccccttcactatggcctcttgctcccgtgactctacagtgagactctggtcattaacagccttagtcactcctgtacaaataaatattctggcagacagatcttgggaagaaattattgggaacactgattatgctatagaaccaggcactcctcctctactgtgtggtaaagtgtcaagagatattagacaggaaatagaaaaactaactgctaattctcaagtgaaaaaactaagatggttctcagaatgtttatctcctccaggtggcagtgacaatttatggaacttggttgctgtgataaaaggacaggatgatagcttacttcctcagaactactgcaaaggaataatgcacttgaaacatctgattaaatttagaacatctgaagctcaagaactaacaacagtcaagatgtctaaatttggtggtggtattggtgtacctgctaaagaggaaagactgaaggaagctgctgaaatccacttgagattaggacaaattcagagatactgtgaacttatggttgaacttggagagtgggacaaagccctgtcaattgcaccaggagtctctgtgaaatactggaagaagttaatgcagaggagagctgaccaattaatccaggaagataaggatgatgtcattccatactgcatagccattggtgatgtgaaaaagctagtccattttttcatgtcaagaggtcagcttaaagaagctctgcttgttgcacaggctgcttgtgaaggaaatatgcagcccttacatgtttccgtgcctaaaggagcttcatattctgatgatatctacaaggaagactttaatgaactcctgcacaaagtcagtaaagaactggcagaatggtattttcaagatggtcgagcagtactagccgcatgttgccatcttgccatagataatattgagcttgctatggcatacctgattcgcggaaatgaactggagttggcagtctgtgtgggcacagtactaggagagtctgcagcaccagcaacccactatgccttagaattactggcgagaaagtgcatgatgatttcagtatgctttccatgtgttggatacagtgtccccttttgttacgttaacaggaatttggcagctgatcttcttctgatgattcctgataatgaactacatttaataaaactctgtgctttctacccaggatgtactgaagagataaatgaccttcatgataagtgtaagctacccacagtggaagaatgtatgcagttagctgagacagcccgtgcagatgacaatatatttgaaactgtaaaatattacttgttaagtcaagaacctgaaaaagcccttcctattggtattagctttgttaaagaatacatcagtagctcagactggactttggataccatataccctgttcttgacctactgagctatattcgtactgaaaaattactcttgcatacgtgtactgaagctcgaaatgagttgctgatattatgtggttacattggtgcattactggctatcagaagacagtaccaaagcattgttccagcactttatgagtacacaagtcagctattaaaacgtcgggaggtgtcagtacctttaaaaattgaatatctttctgaggaattggatgcatggagagcttgcacacagtccaccaacagatcattagaagactctccgtatacacccccttctgattcacaaagaatgatttatgcaactttattaaagagactaaaagaagagtcactgaaaggaattattggaccagattatgtgactggatcaaatcttccaagtcattctgatattcacatttcttgtcttacgggattaaaaatccagggccctgtgtttttccttgaagacgggaaatctgctatctccttgaatgatgctttgatgtgggcaaaggtgaatccattctcacctttagggactggaatacgactcaatccattctga

SEQ ID NO: 238 - DNA, 1200 bp, Homo sapiens
atggcggaggcgatggatttgggcaaagaccccaacgggcccacccattcctcgactctgttcgtgagggacgacggcagctccatgtccttctacgtgcggcccagcccggccaagcgtcggctgtcgacgctcatcctgcacggcggcggcaccgtgtgccgagtgcaggagcccggggccgtgctgctggcccagcccggggaggcgctggccgaggcctcgggtgatttcatctccacgcagtacatcctggactgcgtggagcgcaacgagaggctggagctggaggcctatcggctgggccccgcctcggcggcggacaccggctcggaagcaaagcccggggccctggccgagggcgccgcggagccggagccgcagcggcacgccgggcggatcgccttcacggatgcggacgacgtagccatccttacctacgtgaaggaaaatgcccgctcgcccagctccgtcaccggtaacgccttgtggaaagcgatggagaagagctcgctcacgcagcactcgtggcagtccctgaaggaccgctacctcaagcacctgcggggccaggagcataagtacctgctgggggacgcgccggtgagcccctcctcccagaagctcaagcggaaggcggaggaggacccggaggccgcggatagcggggaaccacagaataagagaactccagatttgcctgaagaagagtatgtgaaggaagaaatccaggagaatgaagaagcagtcaaaaagatgcttgtggaagccacccgggagtttgaggaggttgtggtggatgagagccctcctgattttgaaatacatataactatgtgtgatgatgatccacccacacctgaggaagactcagaaacacagcctgatgaggaggaagaagaagaagaagaaaaagtttctcaaccagaggtgggagctgccattaagatcattcggcagttaatggagaagtttaacttggatctatcaacagttacacaggccttcctaaaaaatagtggtgagctggaggctacttccgccttcttagcgtctggtcagagagctgatggatatcccatttggtcccgacaagatgacatagatttgcaaaaagatgatgaggataccagagaggcattggtcaaaaaatttggtgctcagaatgtagctcggaggattgaatttcgaaagaaataa

SEQ ID NO: 239 - DNA, 1563 bp, Homo sapiens
atgcgctgcgcgctggcgctctcggcgctgctgctactgttgtcaacgccgccgctgctgccgtcgtcgccgtcgccgtcgccgtcgccctcccagaatgcaacccagactactacggactcatctaacaaaacagcaccgactccagcatccagtgtcaccatcatggctacagatacagcccagcagagcacagtccccacttccaaggccaacgaaatcttggcctcggtcaaggcgaccacccttggtgtatccagtgactcaccggggactacaaccctggctcagcaagtctcaggcccagtcaacactaccgtggctagaggaggcggctcaggcaaccctactaccaccatcgagagccccaagagcacaaaaagtgcagacaccactacagttgcaacctccacagccacagctaaacctaacaccacaagcagccagaatggagcagaagatacaacaaactctggggggaaaagcagccacagtgtgaccacagacctcacatccactaaggcagaacatctgacgacccctcaccctacaagtccacttagcccccgacaacccacttcgacgcatcctgtggccaccccaacaagctcgggacatgaccatcttatgaaaatttcaagcagttcaagcactgtggctatccctggctacaccttcacaagcccggggatgaccaccaccctaccgtcatcggttatctcgcaaagaactcaacagacctccagtcagatgccagccagctctacggccccttcctcccaggagacagtgcagcccacgagcccggcaacggcattgagaacacctaccctgccagagaccatgagctccagccccacagcagcatcaactacccaccgataccccaaaacaccttctcccactgtggctcatgagagtaactgggtaactccagcaggggtggcaagtaggagaacccagactcgggtagaagaggctttaagacaagggggcgcttcggatgagaaattgatctcactgatatgccgagcagtcaaagccaccttcaacccggcccaagataagtgcggcatacggctggcatctgttccaggaagtcagaccgtggtcgtcaaagaaatcactattcacactaagctccctgccaaggatgtgtacgagcggctgaaggacaaatgggatgaactaaaggaggcaggggtcagtgacatgaagctaggggaccaggggccaccggaggaggccgaggaccgcttcagcatgcccctcatcatcaccatcgtctgcatggcatcattcctgctcctcgtggcggccctctatggctgctgccaccagcgcctctcccagaggaaggaccagcagcggctaacagaggagctgcagacagtggagaatggttaccatgacaacccaacactggaagtgatggagacctcttctgagatgcaggagaagaaggtggtcagcctcaacggggagctgggggacagctggatcgtccctctggacaacctgaccaaggacgacctggatgaggaggaagacacacacctctag

SEQ ID NO: 240 - DNA, 810 bp, Homo sapiens
atggagcgctcgcagagccgcctcagtctgtccgcctccttcgaggcgctcgccatctacttcccgtgcatgaactccttcgacgacgaggacgcaggggacagccggaggctgaagggggccatccagaggagcacggagacgggcctggcagtggagatgcccagccggacactgcgccaggccagccacgagtccattgaggacagcatgaacagctatggctcagagggcaaccttaactatggaggagtttgcctggcgtcggacgcccagttcagtgacttcctgggaagcatggggccggcacagtttgtgggccgccagaccctggccaccacacccatgggggatgtggagatcggtctgcaggagcggaacggtcagttggaggtggacattatccaggctcggggactgacagccaagccaggctccaagacactgccagcggcctacatcaaggcctacctgctagagaatggcatctgcattgccaagaagaagaccaaagtcgctcgcaagtcgctggacccactgtataaccaggtgctgctgtttcctgagagtccccagggcaaagtcctccaggtgatcgtgtgggggaactacgggcggatggagcggaagcagttcatgggtgtggctcgcgtgctgctggaggagctggacttgaccaccctggccgtgggctggtacaagctcttccccacctcctccatggtggacccagccacaggccccctgctccggcaggcatcccagttgtccctcgagagcaccgtggggccctgcggagaacgatcttag

SEQ ID NO: 241 - DNA, 1818 bp, Homo sapiens
atgggccggctgctgcgggccgcccggctgccgccgctgctttcgccgctgctgcttctgctggttgggggagcgttcctgggtgcctgtgtggctgggtctgatgagcctggcccagagggcctcacctccacctccctgctagacctcctgctgcccactggcttggagccactggactcagaggagcctagtgagaccatgggcctgggagctgggctgggagcccctggctcaggcttccccagcgaagagaatgaagagtctcggattctgcagccaccacagtacttctgggaagaggaggaagagctgaatgactcaagtctggacctgggacccactgcagattatgtttttcctgacttaactgagaaggcaggttccattgaagacaccagccaggctcaagagctgccaaacctcccctctcccttgcccaagatgaatctggttgagcctccctggcatatgcctcccagagaggaggaagaagaggaagaggaagaggaggagagggagaaggaagaggtagagaaacaagaggaggaggaagaggaggagctgctccctgtgaatggatcccaagaagaagccaagcctcaggtccgtgacttttctctcaccagcagcagccagaccccaggggccaccaaaagcaggcatgaagactccggggaccaggcctcatcaggtgtggaggtggagagcagcatggggcccagcttgctgctgccttcagtcaccccaactacagtgactccgggggaccaggactccaccagccaagaggcagaggccacagtgctgccagctgcagggcttggggtagagttcgaggctcctcaggaagcaagcgaggaagccactgcaggagcagctggtttgtctggccagcacgaggaggtgccggccttgccttcattccctcaaaccacagctcccagtggggccgagcacccagatgaagatccccttggctctagaacctcagcctcttccccactggcccctggagacatggaactgacaccttcctctgctaccttgggacaagaagatctcaaccagcagctcctagaagggcaggcagctgaagctcaatccaggataccctgggattctacgcaggtgatctgcaaggactggagcaatctggctgggaaaaactacatcattctgaacatgacagagaacatagactgtgaggtgttccggcagcaccgggggccacagctcctggccctggtggaagaggtgctgccccgccatggcagtggccaccatggggcctggcacatctctctgagcaagcccagcgagaaggagcagcaccttctcatgacactggtgggcgagcagggggtggtgcccactcaagatgtcctttccatgctgggtgacatccgcaggagcctggaggagattggcatccagaactattccacaaccagcagctgccaggcgcgggccagccaggtgcgcagcgactacggcacgctcttcgtggtgctggtggtcattggggccatctgcatcatcatcattgcgcttggcctgctctacaactgctggcagcgccggctgcccaagctcaagcacgtgtcgcacggcgaggagctgcgcttcgtggagaacggctgccacgacaaccccacgctggacgtggccagcgacagccagtcggagatgcaggagaagcaccccagcctgaacggcggcggggccctcaacggcccggggagctggggggcgctcatggggggcaagcgggaccccgaggactcggacgtgttcgaggaggacacgcacctgtga

SEQ ID NO: 242 - DNA, 942 bp, Homo sapiens
atggaaacaggacctgaagacccttccagcatgccagaggaaagttcccccaggcggaccccgcagagcattccctaccaggacctccctcacctggtcaatgcagacggacagtacctcttctgcaggtactggaaacccacaggcacacccaaggccctcatctttgtgtcccatggagccggagagcacagtggccgctatgaagagctggctcggatgctgatggggctggacctgctggtgttcgcccacgaccatgttggccacggacagagcgaaggggagaggatggtagtgtctgacttccacgttttcgtcagggatgtgttgcagcatgtggattccatgcagaaagactaccctgggcttcctgtcttccttctgggccactccatgggaggcgccatcgccatcctcacggccgcagagaggccgggccacttcgccggcatggtactcatttcgcctctggttcttgccaatcctgaatctgcaacaactttcaaggtccttgctgcgaaagtgctcaaccttgtgctgccaaacttgtccctcgggcccatcgactccagcgtgctctctcggaataagacagaggtcgacatttataactcagaccccctgatctgccgggcagggctgaaggtgtgcttcggcatccaactgctgaatgccgtctcacgggtggagcgcgccctccccaagctgactgtgcccttcctgctgctccagggctctgccgatcgcctatgtgacagcaaaggggcctacctgctcatggagttagccaagagccaggacaagactctcaagatttatgaaggtgcctaccatgttctccacaaggagcttcctgaagtcaccaactccgtcttccatgaaataaacatgtgggtctctcaaaggacagccacggcaggaactgcgtccccaccctga

SEQ ID NO: 243 - DNA, 13968 bp, Homo sapiens
atggatcgcgggccggcagcagtggcgtgcacgctgctcctggctctcgtcgcctgcctagcgccggccagtggccaagaatgtgacagtgcgcattttcgctgtggaagtgggcattgcatccctgcagactggaggtgtgatgggaccaaagactgttcagatgacgcggatgaaattggctgcgctgttgtgacctgccagcagggctatttcaagtgccagagtgagggacaatgcatccccaactcctgggtgtgtgaccaagatcaagactgtgatgatggctcagatgaacgtcaagattgctcacaaagtacatgctcaagtcatcagataacatgctccaatggtcagtgtatcccaagtgaatacaggtgcgaccacgtcagagactgccccgatggagctgatgagaatgactgccagtacccaacatgtgagcagcttacttgtgacaatggggcctgctataacaccagtcagaagtgtgattggaaagttgattgcagggactcctcagatgaaatcaactgcactgagatatgcttgcacaatgagttttcatgtggcaatggagagtgtatccctcgtgcttatgtctgtgaccatgacaatgattgccaagacggcagtgacgaacatgcttgcaactatccgacctgcggtggttaccagttcacttgccccagtggccgatgcatttatcaaaactgggtttgtgatggagaagatgactgtaaagataatggagatgaagatggatgtgaaagcggtcctcatgatgttcataaatgttccccaagagaatggtcttgcccagagtcgggacgatgcatctccatttataaagtttgtgatgggattttagattgcccaggaagagaagatgaaaacaacactagtaccggaaaatactgtagtatgactctgtgctctgccttgaactgccagtaccagtgccatgagacgccgtatggaggagcgtgtttttgtcccccaggttatatcatcaaccacaatgacagccgtacctgtgttgagtttgatgattgccagatatggggaatttgtgaccagaagtgtgaaagccgacctggccgtcacctgtgccactgtgaagaagggtatatcttggagcgtggacagtattgcaaagctaatgattcctttggcgaggcctccattatcttctccaatggtcgggatttgttaattggtgatattcatggaaggagcttccggatcctagtggagtctcagaatcgtggagtggccgtgggtgtggctttccactatcacctgcaaagagttttttggacagacaccgtgcaaaataaggttttttcagttgacattaatggtttaaatatccaagaggttctcaatgtttctgttgaaaccccagagaacctggctgtggactgggttaataataaaatctatctagtggaaaccaaggtcaaccgcatagatatggtaaatttggatggaagctatcgggttacccttataactgaaaacttggggcatcctagaggaattgccgtggacccaactgttggttatttatttttctcagattgggagagcctttctggggaacctaagctggaaagggcattcatggatggcagcaaccgtaaagacttggtgaaaacaaagctgggatggcctgctggggtaactctggatatgatatcgaagcgtgtttactgggttgactctcggtttgattacattgaaactgtaacttatgatggaattcaaaggaagactgtagttcatggaggctccctcattcctcatccctttggagtaagcttatttgaaggtcaggtgttctttacagattggacaaagatggccgtgctgaaggcaaacaagttcacagagaccaacccacaagtgtactaccaggcttccctgaggccctatggagtgactgtttaccattccctcagacagccctatgctaccaatccgtgtaaagataacaatgggggctgtgagcaggtctgtgtcctcagccacagaacagataatgatggtttgggtttccgttgcaagtgcacattcggcttccaactggatacagatgagcgccactgcattgctgttcagaatttcctcattttttcatcccaagttgctattcgtgggatcccgttcaccttgtctacccaggaagatgtcatggttccagtttcggggaatccttctttctttgtcgggattgattttgacgcccaggacagcactatctttttttcagatatgtcaaaacacatgatttttaagcaaaagattgatggcacaggaagagaaattctcgcagctaacagggtggaaaatgttgaaagtttggcttttgattggatttcaaagaatctctattggacagactctcattacaagagtatcagtgtcatgaggctagctgataaaacgagacgcacagtagttcagtatttaaataacccacggtcggtggtagttcatccttttgccgggtatctattcttcactgattggttccgtcctgctaaaattatgagagcatggagtgacggatctcacctcttgcctgtaataaacactactcttggatggcccaatggcttggccatcgattgggctgcttcacgattgtactgggtagatgcctattttgataaaattgagcacagcacctttgatggtttagacagaagaagactgggccatatagagcagatgacacatccgtttggacttgccatctttggagagcatttattttttactgactggagactgggtgccattattcgagtcaggaaagcagatggtggagaaatgacagttatccgaagtggcattgcttacatactgcatttgaaatcgtatgatgtcaacatccagactggttctaacgcctgtaatcaacccacgcatcctaacggtgactgcagccacttctgcttcccggtgccaaatttccagcgagtgtgtgggtgcccttatggaatgaggctggcttccaatcacttgacatgcgagggggacccaaccaatgaaccacccacagagcagtgtggcttattttccttcccctgtaaaaatggcagatgtgtgcccaattactatctctgtgatggagtcgatgattgtcatgataacagtgatgagcaactatgtggcacacttaataatacctgttcatcttcggcgttcacctgtggccatggggagtgcattcctgcacactggcgctgtgacaaacgcaacgactgtgtggatggcagtgatgagcacaactgccccacccacgcacctgcttcctgccttgacacccaatacacctgtgataatcaccagtgtatctcaaagaactgggtctgtgacacagacaatgattgtggggatggatctgatgaaaagaactgcaattcgacagagacatgccaacctagtcagtttaattgccccaatcatcgatgtattgacctatcgtttgtctgtgatggtgacaaggattgtgttgatggatctgatgaggttggttgtgtattaaactgtactgcttctcaattcaagtgtgccagtggggataaatgtattggcgtcacaaatcgttgtgatggtgtttttgattgcagtgacaactcggatgaagcaggctgtccaaccaggcctcctggtatgtgccactcagatgaatttcagtgccaagaagatggtatctgcatcccgaacttctgggaatgtgatgggcatccagactgcctctatggatctgatgagcacaatgcctgtgtccccaagacttgcccttcatcatatttccactgtgacaacggaaactgcatccacagggcatggctctgtgatcgggacaatgactgcggggatatgagtgatgagaaggactgccctactcagccctttcgctgtcctagttggcaatggcagtgtcttggccataacatctgtgtgaatctgagtgtagtgtgtgatggcatctttgactgccccaatgggacagatgagtccccactttgcaatgggaacagctgctcagatttcaatggtggttgtactcacgagtgtgttcaagagccctttggggctaaatgcctatgtccattgggattcttacttgccaatgattctaagacctgtgaagacatagatgaatgtgatattctaggctcttgtagccagcactgttacaatatgagaggttctttccggtgctcgtgtgatacaggctacatgttagaaagtgatgggaggacttgcaaagttacagcatctgagagtctgctgttacttgtggcaagtcagaacaaaattattgccgacagtgtcacctcccaggtccacaatatctattcattggtcgagaatggttcttacattgtagctgttgattttgattcaattagtggtcgtatcttttggtctgatgcaactcagggtaaaacctggagtgcgtttcaaaatggaacggacagaagagtggtatttgacagtagcatcatcttgactgaaactattgcaatagattgggtaggtcgtaatctttactggacagactatgctctggaaacaattgaagtctccaaaattgatgggagccacaggactgtgctgattagtaaaaacctaacaaatccaagaggactagcattagatcccagaatgaatgagcatctactgttctggtctgactggggccaccaccctcgcatcgagcgagccagcatggacggcagcatgcgcactgtcattgtccaggacaagatcttctggccctgcggcttaactattgactaccccaacagactgctctacttcatggactcctatcttgattacatggacttttgtgattataatggacaccatcggagacaggtgatagccagtgatttgattatacggcacccctatgccctaactctctttgaagactctgtgtactggactgaccgtgctactcgtcgggttatgcgagccaacaagtggcatggagggaaccagtcagttgtaatgtataatattcaatggccccttgggattgttgcggttcatccttcgaaacaaccaaattccgtgaatccatgtgccttttcccgctgcagccatctctgcctgctttcctcacaggggcctcatttttactcctgtgtttgtccttcaggatggagtctgtctcctgatctcctgaattgcttgagagatgatcaacctttcttaataactgtaaggcaacatataatttttggaatctcccttaatcctgaggtgaagagcaatgatgctatggtccccatagcagggatacagaatggtttagatgttgaatttgatgatgctgagcaatacatctattgggttgaaaatccaggtgaaattcacagagtgaagacagatggcaccaacaggacagtatttgcttctatatctatggtggggccttctatgaacctggccttagattggatttcaagaaacctttattctaccaatcctagaactcagtcaatcgaggttttgacactccacggagatatcagatacagaaaaacattgattgccaatgatgggacagctcttggagttggctttccaattggcataactgttgatcctgctcgtgggaagctgtactggtcagaccaaggaactgacagtggggttcctgccaagatcgccagtgctaacatggatggcacatctgtgaaaactctctttactgggaacctcgaacacctggagtgtgtcactcttgacatcgaagagcagaaactctactgggcagtcactggaagaggagtgattgaaagaggaaacgtggatggaacagatcgaatgatcctggtacaccagctttcccacccctggggaattgcagtccatgattctttcctttattatactgatgaacagtatgaggtcattgaaagagttgataaggccactggggccaacaaaatagtcttgagagataatgttccaaatctgaggggtcttcaagtttatcacagacgcaatgccgccgaatcctcaaatggctgtagcaacaacatgaatgcctgtcagcagatttgcctgcctgtaccaggaggattgttttcctgcgcctgtgccactggatttaaactcaatcctgataatcggtcctgctctccatataactctttcattgttgtttcaatgctgtctgcaatcagaggctttagcttggaattgtcagatcattcagaaaccatggtgccggtggcaggccaaggacgaaacgcactgcatgtggatgtggatgtgtcctctggctttatttattggtgtgattttagcagctcagtggcatctgataatgcgatccgtagaattaaaccagatggatcttctctgatgaacattgtgacacatggaataggagaaaatggagtccggggtattgcagtggattgggtagcaggaaatctttatttcaccaatgcctttgtttctgaaacactgatagaagttctgcggatcaatactacttaccgccgtgttcttcttaaagtcacagtggacatgcctaggcatattgttgtagatcccaagaacagatacctcttctgggctgactatgggcagagaccaaagattgagcgttctttccttgactgtaccaatcgaacagtgcttgtgtcagagggcattgtcacaccacggggcttggcagtggaccgaagtgatggctacgtttattgggttgatgattctttagatataattgcaaggattcgtatcaatggagagaactctgaagtgattcgttatggcagtcgttacccaactccttatggcatcactgtttttgaaaattctatcatatgggtagataggaatttgaaaaagatcttccaagccagcaaggaaccagagaacacagagccacccacagtgataagagacaatatcaactggctaagagatgtgaccatctttgacaagcaagtccagccccggtcaccagcagaggtcaacaacaacccttgcttggaaaacaatggtgggtgctctcatctctgctttgctctgcctggattgcacaccccaaaatgtgactgtgcctttgggaccctgcaaagtgatggcaagaattgtgccatttcaacagaaaatttcctcatctttgccttgtctaattccttgagaagcttacacttggaccctgaaaaccatagcccacctttccaaacaataaatgtggaaagaactgtcatgtctctagactatgacagtgtaagtgatagaatctacttcacacaaaatttagcctctggagttggacagatttcctatgccaccctgtcttcagggatccatactccaactgtcattgcttcaggtatagggactgctgatggcattgcctttgactggattactagaagaatttattacagtgactacctcaaccagatgattaattccatggctgaagatgggtctaaccgcactgtgatagcccgcgttccaaaaccaagagcaattgtgttagatccctgccaagggtacctgtactgggctgactgggatacacatgccaaaatcgagagagccacattgggaggaaacttccgcgtacccattgtgaacagcagtctggtcatgcccagtgggctgactctggactatgaagaggaccttctctactgggtggatgctagtctgcagaggattgaacgcagcactctgacgggcgtggatcgtgaagtcattgtcaatgcagccgttcatgcttttggcttgactctctatggccagtatatttactggactgacttgtacacacaaagaatttaccgagctaacaaatatgacgggtcaggtcagattgcaatgaccacaaatttgctctcccagcccaggggaatcaacactgttgtgaagaaccagaaacaacagtgtaacaatccttgtgaacagtttaatgggggctgcagccatatctgtgcaccaggtccaaatggtgccgagtgccagtgtccacatgagggcaactggtatttggccaacaacaggaagcactgcattgtggacaatggtgaacgatgtggtgcatcttccttcacctgctccaatgggcgctgcatctcggaagagtggaagtgtgataatgacaacgactgtggggatggcagtgatgagatggaaagtgtctgtgcacttcacacctgctcaccgacagccttcacctgtgccaatgggcgatgtgtccaatactcttaccgctgtgattactacaatgactgtggtgatggcagtgatgaggcagggtgcctgttcagggactgcaatgccaccacggagtttatgtgcaataacagaaggtgcatacctcgtgagtttatctgcaatggtgtagacaactgccatgataataacacttcagatgagaaaaattgccctgatcgcacttgccagtctggatacacaaaatgtcataattcaaatatttgtattcctcgcgtttatttgtgtgacggagacaatgactgtggagataacagtgatgaaaaccctacttattgcaccactcacacgtgcagcagcagtgagttccaatgcgcatctgggcgctgtattcctcaacattggtattgtgatcaagaaacagattgttttgatgcctctgatgaacctgcctcttgtggtcactctgagcgaacatgcctagctgatgagttcaagtgtgatggtgggaggtgcatcccaagcgaatggatctgtgacggtgataatgactgtggggatatgagtgacgaggataaaaggcaccagtgtcagaatcaaaactgctcggattccgagtttctctgtgtaaatgacagacctccggacaggaggtgcattccccagtcttgggtctgtgatggcgatgtggattgtactgacggctacgatgagaatcagaattgcaccaggagaacttgctctgaaaatgaattcacctgtggttacggactgtgtatcccaaagatattcaggtgtgaccggcacaatgactgtggtgactatagcgacgagaggggctgcttataccagacttgccaacagaatcagtttacctgtcagaacgggcgctgcattagtaaaaccttcgtctgtgatgaggataatgactgtggagacggatctgatgagctgatgcacctgtgccacaccccagaacccacgtgtccacctcacgagttcaagtgtgacaatgggcgctgcatcgagatgatgaaactctgcaaccacctagatgactgtttggacaacagcgatgagaaaggctgtggcattaatgaatgccatgacccttcaatcagtggctgcgatcacaactgcacagacaccttaaccagtttctattgttcctgtcgtcctggttacaagctcatgtctgacaagcggacttgtgttgatattgatgaatgcacagagatgccttttgtctgtagccagaagtgtgagaatgtaataggctcctacatctgtaagtgtgccccaggctacctccgagaaccagatggaaagacctgccggcaaaacagtaacatcgaaccctatctcatttttagcaaccgttactatttgagaaatttaactatagatggctatttttactccctcatcttggaaggactggacaatgttgtggcattagattttgaccgagtagagaagagattgtattggattgatacacagaggcaagtcattgagagaatgtttctgaataagacaaacaaggagacaatcataaaccacagactaccagctgcagaaagtctggctgtagactgggtttccagaaagctctactggttggatgcccgcctggatggcctctttgtctctgacctcaatggtggacaccgccgcatgctggcccagcactgtgtggatgccaacaacaccttctgctttgataatcccagaggacttgcccttcaccctcaatatgggtacctctactgggcagactggggtcaccgcgcatacattgggagagtaggcatggatggaaccaacaagtctgtgataatctccaccaagttagagtggcctaatggcatcaccattgattacaccaatgatctactctactgggcagatgcccacctgggttacatagagtactctgatttggagggccaccatcgacacacggtgtatgatggggcactgcctcaccctttcgctattaccatttttgaagacactatttattggacagattggaatacaaggacagtggaaaagggaaacaaatatgatggatcaaatagacagacactggtgaacacaacacacagaccatttgacatccatgtgtaccatccatataggcagcccattgtgagcaatccctgtggtaccaacaatggtggctgttctcatctctgcctcatcaagccaggaggaaaagggttcacttgcgagtgtccagatgacttccgcacccttcagctgagtggcagcacctactgcatgcccatgtgctccagcacccagttcctgtgcgctaacaatgaaaagtgcattcctatctggtggaaatgtgatggacagaaagactgctcagatggctctgatgaactggccctttgcccgcagcgcttctgccgactgggacagttccagtgcagtgacggcaactgcaccagcccgcagactttatgcaatgctcaccaaaattgccctgatgggtctgatgaagaccgtcttctttgtgagaatcaccactgtgactccaatgaatggcagtgcgccaacaaacgttgcatcccagaatcctggcagtgtgacacatttaacgactgtgaggataactcagatgaagacagttcccactgtgccagcaggacctgccggccgggccagtttcggtgtgctaatggccgctgcatcccgcaggcctggaagtgtgatgtggataatgattgtggagaccactcggatgagcccattgaagaatgcatgagctctgcccatctctgtgacaacttcacagaattcagctgcaaaacaaattaccgctgcatcccaaagtgggccgtgtgcaatggtgtagatgactgcagggacaacagtgatgagcaaggctgtgaggagaggacatgccatcctgtgggggatttccgctgtaaaaatcaccactgcatccctcttcgttggcagtgtgatgggcaaaatgactgtggagataactcagatgaggaaaactgtgctccccgggagtgcacagagagcgagtttcgatgtgtcaatcagcagtgcattccctcgcgatggatctgtgaccattacaacgactgtggggacaactcagatgaacgggactgtgagatgaggacctgccatcctgaatattttcagtgtacaagtggacattgtgtacacagtgaactgaaatgcgatggatccgctgactgtttggatgcgtctgatgaagctgattgtcccacacgctttcctgatggtgcatactgccaggctactatgttcgaatgcaaaaaccatgtttgtatcccgccatattggaaatgtgatggcgatgatgactgtggcgatggttcagatgaagaacttcacctgtgcttggatgttccctgtaattcaccaaaccgtttccggtgtgacaacaatcgctgcatttatagtcatgaggtgtgcaatggtgtggatgactgtggagatggaactgatgagacagaggagcactgtagaaaaccgacccctaaaccttgtacagaatatgaatataagtgtggcaatgggcattgcattccacatgacaatgtgtgtgatgatgccgatgactgtggtgactggtccgatgaactgggttgcaataaaggaaaagaaagaacatgtgctgaaaatatatgcgagcaaaattgtacccaattaaatgaaggaggatttatctgctcctgtacagctgggttcgaaaccaatgtttttgacagaacctcctgtctagatatcaatgaatgtgaacaatttgggacttgtccccagcactgcagaaataccaaaggaagttatgagtgtgtctgtgctgatggcttcacgtctatgagtgaccgccctggaaaacgatgtgcagctgagggtagctctcctttgttgctactgcctgacaatgtccgaattcgaaaatataatctctcatctgagaggttctcagagtatcttcaagatgaggaatatatccaagctgttgattatgattgggatcccaaggacataggcctcagtgttgtgtattacactgtgcgaggggagggctctaggtttggtgctatcaaacgtgcctacatccccaactttgaatccggccgcaataatcttgtgcaggaagttgacctgaaactgaaatacgtaatgcagccagatggaatagcagtggactgggttggaaggcatatttactggtcagatgtcaagaataaacgcattgaggtggctaaacttgatggaaggtacagaaagtggctgatttccactgacctggaccaaccagctgctattgctgtgaatcccaaactagggcttatgttctggactgactggggaaaggaacctaaaatcgagtctgcctggatgaatggagaggaccgcaacatcctggttttcgaggaccttggttggccaactggcctttctatcgattatttgaacaatgaccgaatctactggagtgacttcaaggaggacgttattgaaaccataaaatatgatgggactgataggagagtcattgcaaaggaagcaatgaacccttacagcctggacatctttgaagaccagttatactggatatctaaggaaaagggagaagtatggaaacaaaataaatttgggcaaggaaagaaagagaaaacgctggtagtgaacccttggctcactcaagttcgaatctttcatcaactcagatacaataagtcagtgcccaacctttgcaaacagatctgcagccacctctgccttctgagacctggaggatacagctgtgcctgtccccaaggctccagctttatagaggggagcaccactgagtgtgatgcagccatcgaactgcctatcaacctgccccccccatgcaggtgcatgcacggaggaaattgctattttgatgagactgacctccccaaatgcaagtgtcctagcggctacaccggaaaatattgtgaaatggcgttttcaaaaggcatctctccaggaacaaccgcagtagctgtgctgttgacaatcctcttgatcgtcgtaattggagctctggcaattgcaggattcttccactatagaaggaccggctcccttttgcctgctctgcccaagctgccaagcttaagcagtctcgtcaagccctctgaaaatgggaatggggtgaccttcagatcaggggcagatcttaacatggatattggagtgtctggttttggacctgagactgctattgacaggtcaatggcaatgagtgaagactttgtcatggaaatggggaagcagcccataatatttgaaaacccaatgtactcagccagagacagtgctgtcaaagtggttcagccaatccaggtgactgtatctgaaaatgtggataataagaattatggaagtcccataaacccttctgagatagttccagagacaaacccaacttcaccagctgctgatggaactcaggtgacaaaatggaatctcttcaaacgaaaatctaaacaaactaccaactttgaaaatccaatctatgcacagatggagaacgagcaaaaggaaagtgttgctgcgacaccacctccatcaccttcgctccctgctaagcctaagcctccttcgagaagagacccaactccaacctattctgcaacagaagacacttttaaagacaccgcaaatcttgttaaagaagactctgaagtatag

SEQ ID NO: 244 - DNA, 1239 bp, Homo sapiens
atggatacttctccctccagaaaatatccagttaaaaaacgggtgaaaatacatcccaacacagtgatggtgaaatatacttctcattatccccagcctggcgatgatggatatgaagaaatcaatgaaggctatggaaattttatggaggaaaatccaaagaaaggtctgctgagtgaaatgaaaaaaaaagggagagctttctttggaaccatggataccctacctccaccaacagaagacccaatgatcaatgagattggacaattccagagctttgcagaaaaaaacatttttcaatcccgaaaaatgtggatagtgctgtttggatctgctttggctcatggatgtgtagctcttatcactaggcttgtttctgatcggtctaaagttccatctctagaactgatttttatccgttctgtttttcaggtcttatctgtgttagttgtgtgttactatcaggaggccccctttggacccagtggatacagattacgactcttcttttatggtgtatgcaatgtcatttctatcacttgtgcttatacatcattttcaatagttcctcccagcaatgggaccactatgtggagagccacaactacagtcttcagtgccattttggcttttttactcgtagatgagaaaatggcttatgttgacatggctacagttgtttgcagcatcttaggtgtttgtcttgtcatgatcccaaacattgttgatgaagacaattctttgttaaatgcctggaaagaagcctttgggtacaccatgactgtgatggctggactgaccactgctctctcaatgatagtatacagatccatcaaggagaagatcagcatgtggactgcactgtttacttttggttggactgggacaatttggggaatatctactatgtttattcttcaagaacccatcatcccattagatggagaaacctggagttatctcattgctatatgtgtctgttctactgcagcattcttaggagtttattatgccttggacaaattccatccagctttggttagcacagtacaacatttggagattgtggtagctatggtcttgcagcttctcgtgctgcacatatttcctagcatctatgatgtttttggaggggtaatcattatgattagtgtttttgtccttgctggctataaactttactggaggaatttaagaaagcaggactaccaggaaatactagactctcccattaaatga

SEQ ID NO: 245 - DNA, 2268 bp, Homo sapiens
atggccggctgcatccctgaggagaaaacttaccggcgcttcctggagctattcctgggcgagtttcgcggaccgtgcggcggcggcgagccggagccggaacccgaacccgaacccgaacccgaacccgagtccgagcccgagcccgaacctgaactggtagaagctgaggcggccgaggcttcggtagaggaacccggggaggaggcggccacggtagccgcgacggaggagggggaccaggagcaagacccggagcccgaggaggaggcggcggttgagggtgaggaggaggaggagggcgcggcgacggcggcggcagccccggggcactcggccgtgccgccgccgccgccccagctgccgcctttgcccccgctcccgcgaccgctgtcagagcgcatcacccgcgaggaggtggagggcgaaagcctggacctgtgcctgcagcagctctacaaatataattgcccttcctttttggctgctgctttagccagagccacatcagatgaagtccttcagagtgatctttctgcacattatatcccaaaggaaacggatggcacagaagggactgtggagattgagacagtgaaattggcccgttctgtcttcagcaaactacacgagatttgctgcagctgggtgaaagacttccccctccgcaggagaccccagctttattatgagacatcaatccatgccatcaaaaacatgcgcaggaaaatggaggacaaacatgtctgcattcctgactttaatatgctcttcaacctagaggaccaggaagaacaagcttactttgcagtgtttgatggccatgggggagtagatgctgctatttatgcctccattcacctccacgttaacttagtccgccaggagatgttcccccatgatcctgctgaggccctgtgcagggccttccgggtcactgatgagcggtttgtgcagaaagcagccagggagagcttaagatgtgggaccacaggagtggtgactttcatcagaggcaacatgctacatgtggcctgggtgggtgattcccaggttatgcttgtgagaaagggccaagctgttgaactaatgaagccacacaaaccagacagagaggatgaaaagcagagaattgaggcccttggaggttgcgtagtctggtttggtgcctggagggtgaatggaagtctgtcggtttccagagctattggagatgctgaacataagccatatatctgtggggatgcagattctgcctccactgttctggatgggaccgaagactacctcattctggcctgtgatggcttctatgacaccgtgaaccctgatgaggcagtgaaagttgtgtccgaccacctgaaagagaataatggagacagcagcatggttgcccacaaattagtggcatcagctcgtgatgctgggtcaagtgataacatcacggttattgtggtattcctgagggacatgaacaaagctgtaaatgttagtgaggaatcagattggacagagaactcttttcaaggagggcaagaagatggtggggatgataaggagaatcatggagagtgcaaacgcccttggcctcagcaccagtgctcagcaccagccgacctaggctatgatgggcgtgtggattcattcactgatagaactagcctgagcccagggtcccaaatcaacgtgctggaagacccaggctacctagatctcacacaaatagaagcaagcaaacctcacagtgcccagtttttgctaccagttgagatgtttggtcctggtgcaccaaagaaagcaaatcttattaatgagttaatgatggagaaaaaatcagttcagtcatcattgcctgaatggagtggtgctggagagtttcccactgctttcaatttgggttcaacaggggagcagatatacagaatgcagagcttgtctcctgtctgttcagggttggaaaatgaacagttcaaatccccgggaaacagagtttctagattgtctcatttacgccaccactactcaaagaagtggcacagattcaggtttaatccaaagttttattcatttctctctgctcaagagccttcccacaaaataggcactagcctgtcctcacttactggaagtgggaagagaaataggataagaagttctctgccatggaggcaaaatagttggaaagggtacagtgaaaacatgaggaagctcagaaagactcatgatattccatgcccagatcttccttggagctataaaatagaataa

SEQ ID NO: 246 - DNA, 3048 bp, Homo sapiens
atggggccgccgctcccgctgctgctgctgctactgctgctgctgccgccacgcgtcctgcctgccgccccttcgtccgtcccccgcggccggcagctcccggggcgtctgggctgcctgctcgaggagggcctctgcggagcgtccgaggcctgtgtgaacgatggagtgtttggaaggtgccagaaggttccggcaatggacttttaccgctacgaggtgtcgcccgtggccctgcagcgcctgcgcgtggcgttgcagaagctttccggcacaggtttcacgtggcaggatgactatactcagtatgtgatggaccaggaacttgcagacctcccgaaaacctacctgaggcgtcctgaagcatccagcccagccaggccctcaaaacacagcgttggcagcgagaggaggtacagtcgggagggcggtgctgccctggccaacgccctccgacgccacctgcccttcctggaggccctgtcccaggccccagcctcagacgtgctcgccaggacccatacggcgcaggacagaccccccgctgagggtgatgaccgcttctccgagagcatcctgacctatgtggcccacacgtctgcgctgacctaccctcccgggtcccggacccagctccgcgaggacctcctgccgcggaccctcggccagctccagccagatgagctcagccctaaggtggacagtggtgtggacagacaccatctgatggcggccctcagtgcctatgctgcccagaggcccccagctccccccggggagggcagcctggagccacagtaccttctgcgtgcaccctcaagaatgcccaggcctttgctggcaccagccgccccccagaagtggccttcacctctgggagattccgaagacccctccagcacaggcgatggagcacggattcataccctcctgaaggacctgcagaggcagccggctgaggtgaggggcctgagtggcctggagctggacggcatggctgagctgatggctggcctgatgcaaggcgtggaccatggagtagctcgaggcagccctgggagagcggccctgggagagtctggagaacaggcggatggccccaaggccaccctccgtggagacagctttccagatgacggagtgcaggacgacgatgatagactttaccaagaggtccatcgtctgagtgccacactcgggggcctcctgcaggaccacgggtctcgactcttacctggagccctcccctttgcaaggcccctcgacatggagaggaagaagtccgagcaccctgagtcttccctgtcttcagaagaggagactgccggagtggagaacgtcaagagccagacgtattccaaagatctgctggggcagcagccgcattcggagcccggggccgctgcgtttggggagctccaaaaccagatgcctgggccctcgaaggaggagcagagccttccagcgggtgctcaggaggccctcagcgacggcctgcaattggaggtccagccttccgaggaagaggcgcggggctacatcgtgacagacagagaccccctgcgccccgaggaaggaaggcggctggtggaggacgtcgcccgcctcctgcaggtgcccagcagtgcgttcgctgacgtggaggttctcggaccagcagtgaccttcaaagtgagcgccaatgtccaaaacgtgaccactgaggatgtggagaaggccacagttgacaacaaagacaaactggaggaaacctctggactgaaaattcttcaaaccggagtcgggtcgaaaagcaaactcaagttcctgcctcctcaggcggagcaagaagactccaccaagttcatcgcgctcaccctggtctccctcgcctgcatcctgggcgtcctcctggcctctggcctcatctactgcctccgccatagctctcagcacaggctgaaggagaagctctcgggactagggggcgacccaggtgcagatgccactgccgcctaccaggagctgtgccgccagcgtatggccacgcggccaccagaccgacctgagggcccgcacacgtcacgcatcagcagcgtctcatcccagttcagcgacgggccgatccccagcccctccgcacgcagcagcgcctcatcctggtccgaggagcctgtgcagtccaacatggacatctccaccggccacatgatcctgtcctacatggaggaccacctgaagaacaagaaccggctggagaaggagtgggaagcgctgtgcgcctaccaggcggagcccaacagctcgttcgtggcccagagggaggagaacgtgcccaagaaccgctccctggccgtgctgacctatgaccactcccgggtcctgctgaaggcggagaacagccacagccactcagactacatcaacgctagccccatcatggatcacgacccgaggaaccccgcgtacatcgccacccagggaccgctgcccgccaccgtggctgacttttggcagatggtgtgggagagcggctgcgtggtgatcgtcatgctgacacccctcgcggagaacggcgtccggcagtgctaccactactggccggatgaaggctccaatctctaccacatctatgaggtgaacctggtctccgagcacatctggtgtgaggacttcctggtgaggagcttctatctgaagaacctgcagaccaacgagacgcgcaccgtgacgcagttccacttcctgagttggtatgaccgaggagtcccttcctcctcaaggtccctcctggacttccgcagaaaagtaaacaagtgctacaggggccgttcttgtccaataattgttcattgcagtgacggtgcaggccggagcggcacctacgtcctgatcgacatggttctcaacaagatggccaaaggtgctaaagagattgatatcgcagcgaccctggagcacttgagggaccagagacccggcatggtccagacgaaggagcagtttgagttcgcgctgacagccgtggctgaggaggtgaacgccatcctcaaggcccttccccagtga

SEQ ID NO: 247 - DNA, 624 bp, Homo sapiens
atgtccagtgataggcaaaggtccgatgatgagagccccagcaccagcagtggcagttcagatgcggaccagcgagacccagccgctccagagcctgaagaacaagaggaaagaaaaccttctgccacccagcagaagaaaaacaccaaactctctagcaaaaccactgctaagttatccactagtgctaaaagaattcagaaggagctagctgaaataacccttgatcctcctcctaattgcagtgctgggcctaaaggagataacatttatgaatggagatcaactatacttggtccaccgggttctgtatatgaaggtggtgtgttttttctggatatcacattttcatcagattatccatttaagccaccaaaggttactttccgcaccagaatctatcactgcaacatcaacagtcagggagtcatctgtctggacatccttaaagacaactggagtcccgctttgactatttcaaaggttttgctgtctatttgttcccttttgacagactgcaaccctgcggatcctctggttggaagcatagccactcagtatttgaccaacagagcagaacacgacaggatagccagacagtggaccaagagatacgcaacataa

SEQ ID NO: 248 - DNA, 4884 bp, Homo sapiens
atgcggctctggagttgggtgctgcacctggggctgctgagcgccgcgctgggctgcgggctggccgagcgtccccgccgggcccggagagacccgcgggccggccgacccccgcgccccgccgccggcccggccacctgcgccacccgggcggcccgcggccgccgcgcctcgccgccgccgccgccgccgccgggcggtgcctgggaagccgtgcgcgtcccccggcggcggcagcagcgggaggcgaggggcgccaccgaggagccgagcccgccgagccgggcgctctatttcagcgggcgaggcgagcagctgcgcctccgggccgacctcgagctgccccgggacgcgttcacgctgcaagtgtggctgcgagcggaggggggccagaggtctccggcagtgatcacagggctgtatgacaaatgttcttatatctcacgtgaccgaggatgggtcgtgggcattcacaccatcagtgaccaagacaacaaagacccacgctactttttctccttgaagacagaccgagcccggcaagtgaccaccatcaatgcccaccgcagctacctcccaggccagtgggtatacctagctgccacctatgatgggcagttcatgaagctctatgtgaatggtgcccaggtggccacctctggggaacaagtgggtggcatattcagcccactgacccagaagtgcaaagtgctcatgttagggggcagtgccctgaatcacaactaccggggctacatcgagcacttcagtctgtggaaggtggccaggactcagcgggagatactgtctgacatggaaacccatggcgcccacactgctctacctcagctcctcctccaggagaactgggacaatgtgaagcatgcctggtcccccatgaaggatggcagcagccccaaagtggaattcagcaatgcccacggctttctgctggacacgagtctggagcctcctctgtgcggacagacattgtgtgacaacacagaggtcattgccagctacaatcagctctcaagtttccgccagcccaaggtggtgcgctaccgcgtggtcaacctctatgaagatgatcataagaacccgacggtgacgcgcgagcaggtggacttccagcaccatcagctggctgaggccttcaagcaatacaacatctcctgggagctggacgtgctggaggtgagcaactcctcccttcgccgccgcctcatcctggccaactgtgacatcagcaagattggggatgagaactgtgaccccgagtgcaaccacacgctgacgggccacgacggcggggattgccgccacctgcgccaccctgccttcgtgaagaagcagcacaacggggtgtgtgacatggactgcaactatgaacggttcaactttgatggtggagagtgctgtgaccctgaaatcaccaatgtcactcagacttgctttgaccccgactctccacacagagcctacttggatgttaatgagctgaagaacattcttaaattggatggatcaacacatctcaatattttctttgcaaaatcctcagaggaggagttggcaggagtagcaacttggccatgggacaaggaggccctgatgcacttaggtggcattgtcttgaacccatctttctatggcatgcctgggcacacccacaccatgatccatgagattggtcacagcctgggcctctatcacgtcttccgaggcatctcagaaatccagtcctgcagtgacccctgcatggagacagagccctccttcgagactggagacctctgcaatgataccaacccagcccctaaacacaagtcctgtggtgacccagggccaggaaatgacacctgtggctttcatagcttcttcaacactccttacaacaacttcatgagctatgcagatgacgactgtacggactccttcacgcccaatcaagtcgccagaatgcactgttacctggacctggtctaccagggctggcagccctccaggaaaccagcgcctgttgccctcgccccccaagttctgggccacacaacggactctgtgacactggagtggttcccacctatagatggccatttctttgaaagagaattgggatcagcatgtcatctttgcctggaagggagaatcctggtgcagtatgcttccaacgcttcctccccaatgccctgcagcccatcaggacactggagccctcgtgaagcagaaggtcatcctgatgttgaacagccctgtaagtccagtgtccgcacctggagcccaaattcagctgtcaacccacacacggttcctccagcctgccctgagcctcaaggctgctacctcgagctggagttcctctaccccttggtccctgagtctctgaccatttgggtgacctttgtctccactgactgggactctagtggagctgtcaatgacatcaaactgttggctgtcagtgggaagaacatctccctgggtcctcagaatgtcttctgtgatgtcccactgaccatcagactctgggacgtgggcgaggaggtgtatggcatccaaatctacacgctggatgagcacctggagatcgatgctgccatgttgacctccactgcagacaccccactctgtctacagtgtaagcccctgaagtataaggtggtccgggaccctcctctccagatggatgtggcctccatcctacatctcaataggaaattcgtagacatggatctaaatcttggcagtgtgtaccagtattgggtcataactatttcaggaactgaagagagtgagccatcacctgctgtcacatacatccatggaagtgggtactgtggcgatggcattatacaaaaagaccaaggtgaacaatgcgacgacatgaataagatcaatggtgatggctgctcccttttctgccgacaagaagtctccttcaattgtattgatgaacccagccggtgctatttccatgatggtgatggggtatgtgaggagtttgaacaaaaaaccagcattaaggactgtggtgtctacacgccccagggattcctggatcagtgggcatccaatgcttcagtatctcatcaagaccagcaatgcccaggctgggtcatcatcggacagccagcagcatcccaggtgtgtcgaaccaaggtgatagatctcagtgaaggcatttcccagcatgcctggtacccttgcaccatcagctacccatattcccagctggctcagaccactttttggctccgggcgtatttttctcaaccaatggttgccgcagctgtcattgtccacctggtgacggatgggacatattatggggaccaaaagcaggagaccatcagcgtgcagctgcttgataccaaagatcagagccacgatctaggcctccatgtcctgagctgcaggaacaatcccctgattatccctgtggtccatgacctcagccagcccttctaccacagccaggcggtacgtgtgagcttcagttcgcccctggtcgccatctcgggggtggccctccgttccttcgacaactttgaccccgtcaccctgagcagctgccagagaggggagacctacagccctgccgagcagagctgcgtgcacttcgcatgtgagaaaactgactgtccagagctggctgtggagaatgcttctctcaattgctccagcagcgaccgctaccacggtgcccagtgtactgtgagctgccggacaggctacgtgctccagatacggcgggatgatgagctgatcaagagccagacgggacccagcgtcacagtgacctgtacagagggcaagtggaataagcaggtggcctgtgagccagtcgactgcagcatcccagatcaccatcaagtctatgctgcctccttctcctgccctgagggcaccacctttggcagtcaatgttccttccagtgccgtcaccctgcacaattgaaaggcaacaacagcctcctgacctgcatggaggatgggctgtggtccttcccagaggccctgtgtgagctcatgtgcctcgctccaccccctgtgcccaatgcagacctccagaccgcccggtgccgagagaataagcacaaggtgggctccttctgcaaatacaaatgcaagcctggataccatgtgcctggatcctctcggaagtcaaagaaacgggccttcaagactcagtgtacccaggatggcagctggcaggagggagcttgtgttcctgtgacctgtgacccacctccaccaaaattccatgggctctaccagtgtactaatggcttccagttcaacagtgagtgtaggatcaagtgtgaagacagtgatgcctcccagggacttgggagcaatgtcattcattgccggaaagatggcacctggaacggctccttccatgtctgccaggagatgcaaggccagtgctcggttccaaacgagctcaacagcaacctcaaactgcagtgccctgatggctatgccatagggtcggagtgtgccacctcgtgcctggaccacaacagcgagtccatcatcctgccaatgaacgtgaccgtgcgtgacatcccccactggctgaaccccacacgggtagagagagttgtctgcactgctggtctcaagtggtatcctcaccctgctctgattcactgtgtcaaaggctgtgagcccttcatgggagacaattattgtgatgccatcaacaaccgagccttttgcaactatgacggtggggattgctgcacctccacagtgaagaccaaaaaggtcaccccattccctatgtcctgtgatctacaaggtgactgtgcttgtcgggacccccaggcccaagaacacagccggaaagacctccggggatacagccatggctaa

SEQ ID NO: 249 - DNA, 714 bp, Homo sapiens
atgttggaggaagatatggaagtcgccataaagatggtggttgtagggaatggagcagttggaaaatcaagtatgattcagcgatattgcaaaggcatttttacaaaagactacaagaaaaccattggagttgattttttggagcgacaaattcaagttaatgatgaagatgtcagactaatgttatgggacactgcaggtcaggaggaatttgatgcaattacaaaggcctactatcgaggagcccaggcttgtgtgctcgtgttctctaccacagatagggaatcttttgaagcagtttccagttggagagagaaagtagtagccgaagtgggagatataccaactgtacttgtgcaaaacaagattgatcttctggatgattcttgtataaagaatgaggaagctgaggcactggcaaaaaggttaaagttaagattctacagaacatcagtgaaagaagatctaaatgtgaatgaagtttttaagtatttggctgaaaaataccttcagaaactcaaacaacaaatagctgaggatccagaactaacgcattcaagtagtaacaagattggtgtctttaatacatctggtggaagtcactccggtcagaattcaggtaccctcaatggtggagatgtcatcaatcttagacccaacaaacaaaggaccaagaaaaacagaaatccttttagcagctgtagcataccctaa

SEQ ID NO: 250 - DNA, 714 bp, Homo sapiens; identical to SEQ ID NO: 249

SEQ ID NO: 251 - DNA, 3585 bp, Homo sapiens
atgatgtgcgaggtgatgcccaccatcagcgaggatggccggcggggctcggcgctgggcccggacgaggcgggcggggagctggagcgcctcatggtcacgatgctcacggagcgcgagcgcctgctggagacgctgcgcgaggcacaggacgggttggctacagcgcagctgcggctgcgcgagctcggccacgagaaggactcgctgcagcgccagctcagcatcgcgctgccccaggagtttgcagctctgacgaaggagctgaacttatgtcgggagcagctgctggagagggaggaagagattgcagagctgaaggcggaacggaacaacacgcggctgctcctggaacacctggagtgcctggtgtccaggcacgagaggtcactgcgcatgaccgtggtgaagcgccaggcccagtccccgggtggggtctcctcggaggtagaagtgctcaaagctctaaagtctctcttcgagcaccacaaggccctggatgagaaggtccgggagcggctgcggatggcgctggagcgcgtggcagtgctcgaggaggagctggaactgagcaatcaggagactctgaaccttcgagaacagctgtctaggcggcggtcagggctggaagagccgggcaaggatggggatgggcagactcttgccaatggcctgggtcctggcggggattccaaccggcgcacagcagagctggaggaggccctggagcggcagcgcgccgaggtgtgccagctgcgggagcgcctggcggtgctgtgccgtcagatgagccagctggaggaggagttgggcaccgcgcaccgtgagctgggcaaggcagaggaagccaactccaagctgcagcgcgacctcaaggaggcgctggcgcagcgggaagatatggaggagcggattacaacactggagaagcgctacctgagcgcccagcgggaggccacgtctctgcacgacgccaacgacaaactggagaacgagttagctagcaaggagtcgttgtatcggcagagtgaagagaagagccgtcagctggccgagtggttggacgacgccaagcagaagctgcagcagacgctgcagaaagcggagaccttgcccgagatagaggcgcagctggcgcagcgcgtggcggcgctcaacaaggccgaggaacgtcatgggaattttgaggagcggcttcggcagctggaggcccagctggaagagaagaatcaagagctgcagcgggcccggcagcgggagaagatgaacgatgaccacaataagcggctgtccgagacggtggacaagctgctgagcgagtccaacgagcgcttacagcttcacctcaaggagcgcatgggggcgctggaggagaagaactccctgagcgaggagatagccaacatgaagaagcttcaggatgagttgctgctaaacaaggagcagctcttggccgaaatggagcggatgcagatggagatcgaccagctgcgggggaggccaccatcctcctactccaggtctctccctggcagtgccctggagctccgttactctcaggcacccactttaccttctggtgcccacctggatccctatgtggctggcagtggtcgggcaggcaagaggggccgctggtcaggggtcaaggaggagccctccaaggattgggagcggtctgcccctgcgggctccataccacccccattccctggggaactggacggctccgatgaggaggaggcagaggggatgtttggggccgagctgctgtcccccagtgggcaggctgacgtgcagacgctggccatcatgcttcaggagcagctggaggccatcaacaaggagatcaagctgatccaagaggagaaggagacaacagaacagagggcagaggagctggagagtcgggtgtccagctctggcttggactcgttgggccgctaccgcagcagctgctccctgcccccctccctcaccacctctacccttgccagcccctcccctcccagctctggccactcaacaccccgcctggcaccccctagccctgcccgtgagggcaccgacaaggctaatcatgtccctaaggaggaagctggagctccacgaggggaggggccggccatcccaggagacaccccaccacccactccccgctctgcccgtcttgagagaatgacccaggccttggcactgcaggcggggtccctggaagatgggggacccccacggggaagtgagggcaccccagattctctgcacaaagcccccaagaagaagagcatcaagtcatccataggccgtctctttggcaagaaagagaagggacgaatgggacccccaggccgggacagctcttctctggctggaacaccctcagatgagacactggccactgaccctctggggctagccaagctgacaggcccaggagacaaggaccgaaggaacaagaggaagcatgaactcctggaggaggcctgccgccagggcctaccttttgctgcctgggacgggcccaccgtggtgtcctggctggagctgtgggtgggcatgcctgcctggtatgtggccgcctgccgggccaatgtcaagagcggtgccatcatggccaacctgtcagacacggagatccagcgcgagatcggcatcagcaacccgctgcaccgactcaagctacgcctcgccatccaggagatggtctcgctcacctcgccctcagcccccgcctcctcccgcacttccacaggaaacgtgtggatgacacacgaggagatggagtcccttacggccacgaccaagcccgagaccaaggagatcagctgggagcagatcctggcatatggcgacatgaaccacgagtgggtggggaacgactggctgcccagcctggggctgccccaataccgcagctacttcatggagtcgctggtggacgctcgaatgttagatcaccttaacaagaaggagctccggggccaactcaagatggtggacagctttcacagggtgagtctacattatgggattatgtgcctgaaacggctcaactatgaccggaaggacctggagcggaggcgggaagaaagtcagacccagatccgagacgtgatggtgtggtccaatgagcgggtcatgggttgggtgtccgggctgggcctgaaggaatttgccacgaacctcacggagagcggggtacacggggcactgctcgccctggacgagaccttcgactactccgacctggccttgctcctgcagatccccacgcagaatgcacaggcccggcagcttctggagaaggaattcagcaaccttatctccttaggcacagacaggcggctggacgaggacagcgccaagtctttcagccgctccccatcctggcggaagatgttccgggagaaggacctccgaggcgtaactcccgactcagctgagatgttgccccccaactttcgttcggctgcagcgggagccctgggctctccggggctccctctccgcaagctgcagccagaaggccagacttctgggagttcccgggcagacggcgtttcggtccggacctattcctgctag

SEQ ID NO: 252 - DNA, 1344 bp, Homo sapiens
atgggggaaccccgggctggggccgccctggacgatggcagcggctggacgggcagtgaggaaggcagtgaggagggtaccggcggcagtgagggggctgggggtgacgggggcccggatgcagagggggtgtggagcccagacattgagcagagcttccaggaggccctggccatctatccaccctgcggccgccggaaaataattttgtctgatgaaggcaagatgtatggtcggaatgaactgatcgcccgctacatcaagctgagaacggggaagacccgaactcgaaaacaggtttctagtcacatccaggttttggcccgaaggaaatcaagggaaatccagtccaagttgaaggaccaggtttccaaggacaaggctttccagacaatggcaaccatgtcctctgcccagctcatctccgcgccttctctgcaggccaaactgggtcccactggtcctcaggcctctgagcttttccagttttggtctggaggatctgggcccccctggaatgttccagatgtgaagccattctcacagacaccgttcaccttgtcactgactcccccatctactgacctcccagggtacgagcccccccaagccctctcacccctgcccccacctaccccatcgcccccagcctggcaggctcggggcctgggcaccgcccggttgcagctggtagagttctcagccttcgtggaaccgccagatgcagttgattcttaccagaggcacctgttcgtgcacatcagccagcactgccccagccccggagcgccgccgctcgagagtgtggacgtccggcagatctacgacaaattccctgagaaaaagggtggcctccgagagctatatgatcgtggccccccccatgccttcttcctggtcaagttctgggcggacctgaactggggcccaagtggtgaggaggcaggggccggtggcagcatcagcagtggtggcttctacggagtgagcagccagtatgagagcctggaacacatgaccctcacctgttcctccaaggtctgctcttttggcaagcaggtggtggagaaggtggagacggaacgggcccagctggaggacggcagatttgtgtaccgcctgctgcgctcgcccatgtgcgagtacctggtgaatttcttgcacaagttgcggcagctgcctgagcgatacatgatgaacagcgtcctggaaaacttcaccatcctccaggtggtgacaaacagagacacccaggaactgctgctctgcaccgcctatgtcttcgaggtctccaccagcgagcgtggggcccagcatcacatttaccgcctggtcagggactga

SEQ ID NO: 253 - DNA, 1530 bp, Homo sapiens
atgaatctcctggaccccttcatgaagatgaccgacgagcaggagaagggcctgtccggcgcccccagccccaccatgtccgaggactccgcgggctcgccctgcccgtcgggctccggctcggacaccgagaacacgcggccccaggagaacacgttccccaagggcgagcccgatctgaagaaggagagcgaggaggacaagttccccgtgtgcatccgcgaggcggtcagccaggtgctcaaaggctacgactggacgctggtgcccatgccggtgcgcgtcaacggctccagcaagaacaagccgcacgtcaagcggcccatgaacgccttcatggtgtgggcgcaggcggcgcgcaggaagctcgcggaccagtacccgcacttgcacaacgccgagctcagcaagacgctgggcaagctctggagacttctgaacgagagcgagaagcggcccttcgtggaggaggcggagcggctgcgcgtgcagcacaagaaggaccacccggattacaagtaccagccgcggcggaggaagtcggtgaagaacgggcaggcggaggcagaggaggccacggagcagacgcacatctcccccaacgccatcttcaaggcgctgcaggccgactcgccacactcctcctccggcatgagcgaggtgcactcccccggcgagcactcggggcaatcccagggcccaccgaccccacccaccacccccaaaaccgacgtgcagccgggcaaggctgacctgaagcgagaggggcgccccttgccagaggggggcagacagccccctatcgacttccgcgacgtggacatcggcgagctgagcagcgacgtcatctccaacatcgagaccttcgatgtcaacgagtttgaccagtacctgccgcccaacggccacccgggggtgccggccacgcacggccaggtcacctacacgggcagctacggcatcagcagcaccgcggccaccccggcgagcgcgggccacgtgtggatgtccaagcagcaggcgccgccgccacccccgcagcagcccccacaggccccgccggccccgcaggcgcccccgcagccgcaggcggcgcccccacagcagccggcggcacccccgcagcagccacaggcgcacacgctgaccacgctgagcagcgagccgggccagtcccagcgaacgcacatcaagacggagcagctgagccccagccactacagcgagcagcagcagcactcgccccaacagatcgcctacagccccttcaacctcccacactacagcccctcctacccgcccatcacccgctcacagtacgactacaccgaccaccagaactccagctcctactacagccacgcggcaggccagggcaccggcctctactccaccttcacctacatgaaccccgctcagcgccccatgtacacccccatcgccgacacctctggggtcccttccatcccgcagacccacagcccccagcactgggaacaacccgtctacacacagctcactcgaccttga

SEQ ID NO: 254 - DNA, 1569 bp, Homo sapiens
atgagcgggtttaattttggaggcactggggcccctacaggcgggttcacgtttggcactgcaaagacggcaacaaccacacctgctacagggttttctttctccacctctggcactggagggtttaattttggggctcccttccaaccagccacaagtaccccttccaccggcctgttctcacttgccacccagactccggccacacagacgacaggcttcacttttggaacagcgactcttgcttcggggggaactggattttctttggggatcggtgcttcaaagctcaacttgagcaacacagctgccaccccagccatggcaaaccccagcggctttgggctgggcagcagcaacctcactaatgccatatcgagcaccgtcacctccagccagggcacagcacccaccggctttgtgtttggcccctccaccacctctgtggctccagctaccacatctggaggcttctcattcactggtggaagcacggcccaaccctccggtttcaacattggctcagcagggaattcagcccagcccacggcacctgccacgttgcccttcactccggccacgccagcagccaccacagcaggtgccacacagccagctgctcccacacccacagccaccatcaccagcactgggcccagcctctttgcgtcaatagcaactgctccaacctcatctgccaccactggactctccctctgtacccctgtgaccacagcgggcgcccccactgctgggacacagggcttcagcttaaaggcacctggagcagcttccggcacctccacaacaacatccaccgctgccaccgccaccgccaccaccaccagcagcagcagcaccaccggctttgccttgaatttaaaaccactggcgccagccgggatccccagcaatacagcagctgccgtgaccgctccacctggccctggcgcagctgcaggggcggctgccagctccgccatgacctacgcgcagctggagagcctgatcaacaaatggagcctggagctagaggaccaggagcggcacttcctccagcaggccacccaggtcaacgcctgggaccgcacgctgatcgagaatggagaaaagatcaccagcctgcaccgcgaggtggagaaggtgaagctggaccagaagaggctggaccaggagctcgacttcatcctgtcccagcagaaggagctggaagacctgctgagcccactggaggagttggtcaaggagcagagcgggaccatctacctgcagcacgcggatgaggagcgtgagaaaacctacaagctggctgagaacatcgatgcacagctcaagcgcatggcccaggatctcaaggacatcatcgagcacctgaacacgtccggggcccccgccgacaccagtgacccactgcagcagatctgcaagatcctcaatgcgcacatggactcactgcagtggatcgaccagaactcggccctgctgcagaggaaggtggaggaggtgaccaaggtgtgcgagggccggcgcaaggagcaggagcgcagcttccggatcacctttgactga

SEQ ID NO: 255 - DNA, 1569 bp, Homo sapiens; identical to SEQ ID NO: 254

SEQ ID NO: 256 - DNA, 1734 bp, Homo sapiens
atggagggctctgggggcggtgcgggcgagcgggcgccgctgctgggcgcgcggcgggcggcggcggccgcggcggcggctggggcgttcgcgggccggcgcgcggcgtgcggggccgtgctgctgacggagctgctggagcgcgccgctttctacggcatcacgtccaacctggtgctattcctgaacggggcgccgttctgctgggagggcgcgcaggccagcgaggcgctgctgctcttcatgggcctcacctacctgggctcgccgttcggaggctggctggccgacgcgcggctgggccgggcgcgcgccatcctgctgagcctggcgctctacctgctgggcatgctggccttcccgctgctggccgcgcccgccacgcgagccgcgctctgcggttccgcgcgcctgctcaactgcacggcgcctggtcccgacgccgccgcccgctgctgctcaccggccaccttcgcggggctggtgctggtgggcctgggcgtggccaccgtcaaggccaacatcacgcccttcggcgccgaccaggttaaagatcgaggtccggaagccactaggagattttttaattggttttattggagcattaacctgggagcgatcctgtcgttaggtggcattgcctatattcagcagaacgtcagctttgtcactggttatgcgatccccactgtctgcgtcggccttgcttttgtggtcttcctctgtggccagagcgttttcatcaccaagcctcctgatggcagtgccttcaccgacatgttcaagatactgacgtattcctgctgttcccagaagcgaagtggagagcgccagagtaatggtgaaggcattggagtctttcagcaatcttctaaacaaagtctgtttgattcatgtaagatgtctcatggtgggccatttacagaagagaaagtggaagatgtgaaagctctggtcaagattgtccctgttttcttggctttgataccttactggacagtgtatttccaaatgcagacaacatatgttttacagagtcttcatttgaggattccagaaatttcaaatattacaaccactcctcacacgctccctgcagcctggctgaccatgtttgatgctgtgctcatcctcctgctcatccctctgaaggacaaactggtcgatcccattttgagaagacatggcctgctcccatcctccctgaagaggatcgccgtgggcatgttctttgtcatgtgctcggcctttgctgcaggaattttggagagtaaaaggctgaaccttgttaaagagaaaaccattaatcagaccatcggcaacgtcgtctaccatgctgccgatctgtcgctgtggtggcaggtgccgcagtacttgctgattgggatcagcgagatctttgcaagtatcgcaggcctggaatttgcatactcagctgcccccaagtccatgcagagtgccataatgggcttgttctttttcttctctggcgtcgggtcgttcgtgggttctggactgctggcactggtgtctatcaaagccatcggatggatgagcagtcacacagactttggtaatattaacggctgctatttgaactattacttttttcttctggctgctattcaaggagctaccctcctgcttttcctcattatttctgtgaaatatgaccatcatcgagaccatcagcgatcaagagccaatggcgtgcccaccagcaggagggcctga

SEQ ID NO: 257 - DNA, 2292 bp, Homo sapiens
atggcgtccctgctgcaagaccagctgaccactgatcaggacttgctgctgatgcaggaaggcatgccgatgcgcaaggtgaggtccaaaagctggaagaagctaagatacttcagacttcagaatgacggcatgacagtctggcatgcacggcaggccaggggcagtgccaagcccagcttctcaatctctgatgtggagacaatacgtaatggccatgattccgagttgctgcgtagcctggcagaggagctccccctggagcagggcttcaccattgtcttccatggccgccgctccaacctggacctgatggccaacagtgttgaggaggcccagatatggatgcgagggctccagctgttggtggatcttgtcaccagcatggaccatcaggagcgcctggaccaatggcagttgcacgattggtttcaacgtggagacaaaaatcaggatggtaagatgagtttccaagaagttcagcggttattgcacctaatgaatgtggaaatggaccaagaatatgccttcagtctttttcaggcagcagacacgtcccagtctggaaccctggaaggagaagaattcgtacagttctataaggcattgactaaacgtgctgaggtgcaggaactgtttgaaagtttttcagctgatgggcagaagctgactctgctggaatttttggatttcctccaagaggagcagaaggagagagactgcacctctgagcttgctctggaactcattgaccgctatgaaccttcagacagtggcaaactgcggcatgtgctgagtatggatggcttcctcagctacctctgctctaaggatggagacatcttcaacccagcctgcctccccatctatcaggatatgactcaacccctgaaccactacttcatctgctcttctcataacacctacctagtgggggaccagctttgtggccagagcagcgtcgagggatatatacgggccctgaagcgggggtgccgctgcgtggaggtggatgtatgggatggacctagcggggaacctgtcgtttaccacggacacaccctgacctcccgcatcctgttcaaagatgtcgtggccacagtagcacagtatgccttccagacatcagactacccagtcatcttgtccctggagacccactgcagctgggagcagcagcagaccatggcccgtcatctgactgagatcctgggggagcagctgctgagcaccaccttggatggggtgctgcccactcagctgccctcgcctgaggagcttcggaggaagatcctggtgaaggggaagaagttaacacttgaggaagacctggaatatgaggaagaggaagcagaacctgagttggaagagtcagaattggcgctggagtcccagtttgagactgagcctgagccccaggagcagaaccttcagaataaggacaaaaagaagaaatccaagcccatcttgtgtccagccctctcttccctggttatctacttgaagtctgtctcattccgcagcttcacacattcaaaggagcactaccacttctacgagatatcatctttctctgaaaccaaggccaagcgcctcatcaaggaggctggcaatgagtttgtgcagcacaatacttggcagttaagccgtgtgtatcccagcggcctgaggacagactcttccaactacaacccccaggaactctggaatgcaggctgccagatggtggccatgaatatgcagactgcagggcttgaaatggacatctgtgatgggcatttccgccagaatggcggctgtggctatgtgctgaagccagacttcctgcgtgatatccagagttctttccaccctgagaagcccatcagccctttcaaagcccagactctcttaatccaggtgatcagcggtcagcaactccccaaagtggacaagaccaaagaggggtccattgtggatccactggtgaaagtgcagatctttggcgttcgtctagacacagcacggcaggagaccaactatgtggagaacaatggttttaatccatactgggggcagacactatgtttccgggtgctggtgcctgaacttgccatgctgcgttttgtggtaatggattatgactggaaatcccgaaatgactttattggtcagtacaccctgccttggacctgcatgcaacaaggttaccgccacattcacctgctgtccaaagatggcatcagcctccgcccagcttccatctttgtgtatatctgcatccaggaaggcctggagggggatgagtcctga

SEQ ID NO: 258 - DNA, 945 bp, Homo sapiens
atgccacttgagcagaggagtcagcactgcaagcctgaggaaggccttgaggcccaaggagaggccctgggcttggtgggtgcgcaggctcctgctactgaggagcaggagactgcctcctcctcctctactctagtggaagtcaccctgcgggaggtgcctgctgccgagtcaccaagtcctccccacagtcctcagggagcctccaccctccccactaccatcaactatactctctggagtcaatccgatgagggctccagcaacgaagaacaggaagggccaagcacctttcctgacctggagacgagcttccaagtagcactcagtaggaagatggctgagttggttcattttctgctcctcaagtatcgagccagggagccattcacaaaggcagaaatgctggggagtgtcatcagaaatttccaggacttctttcctgtgatcttcagcaaagcctccgagtacttgcagctggtctttggcatcgaggtggtggaagtggtccgcatcggccacttgtacatccttgtcacctgcctgggcctctcctacgatggcctgctgggcgacaatcagatcgtgcccaagacaggcctcctgataatcgtcctggccataatcgcaaaagagggcgactgtgcccctgaggagaaaatctgggaggagctgagtgtgttggaggcatctgatgggagggaggacagtgtctttgcgcatcccaggaagctgctcacccaagatttggtgcaggaaaactacctggagtaccggcaggtccccggcagtgatcctgcatgctacgagttcctgtggggtccaagggccctcgttgaaaccagctatgtgaaagtcctgcaccatttgctaaagatcagtggaggacctcacatttcctacccacccctgcatgaatgggcttttagagagggggaagagtga

SEQ ID NO: 259 - DNA, 1854 bp, Homo sapiens
atggctgaagcaaagacccactggcttggagcagccctgtctcttatccctttaattttcctcatctctggggctgaagcagcttcatttcagagaaaccagctgcttcagaaagaaccagacctcaggttggaaaatgtccaaaagtttcccagtcctgaaatgatcagggctttggagtacatagaaaacctccgacaacaagctcataaggaagaaagcagcccagattataatccctaccaaggtgtctctgtcccccttcagcaaaaagaaaatggcgatgaaagccacttgcccgagagggattcactgagtgaagaagactggatgagaataatactcgaagctttgagacaggctgaaaatgagcctcagtctgcaccaaaagaaaataagccctatgccttgaattcagaaaagaactttccaatggacatgagtgatgattatgagacacagcagtggccagaaagaaagcttaagcacatgcaattccctcctatgtatgaagagaattccagggataacccctttaaacgcacaaatgaaatagtggaggaacaatatactcctcaaagccttgctacattggaatctgtcttccaagagctggggaaactgacaggaccaaacaaccagaaacgtgagaggatggatgaggagcaaaaactttatacggatgatgaagatgatatctacaaggctaataacattgcctatgaagatgtggtcgggggagaagactggaacccagtagaggagaaaatagagagtcaaacccaggaagaggtgagagacagcaaagagaatatagaaaaaaatgaacaaatcaacgatgagatgaaacgctcagggcagcttggcatccaggaagaagatcttcggaaagagagtaaagaccaactctcagatgatgtctccaaagtaattgcctatttgaaaaggttagtaaatgctgcaggaagtgggaggttacagaatgggcaaaatggggaaagggccaccaggctttttgagaaacctcttgattctcagtctatttatcagctgattgaaatctcaaggaatttacagatacccccagaagacttaattgagatgctcaaaactggggagaagccgaatggatcagtggaaccggagcgggagcttgaccttcctgttgacctagatgacatctcagaggctgacttagaccatccagacctgttccaaaataggatgctctccaagagtggctaccctaaaacacctggtcgtgctgggactgaggccctaccagacgggctcagtgttgaggatattttaaatcttttagggatggagagtgcagcaaatcagaaaacgtcgtattttcccaatccatataaccaggagaaagttctgccaaggctcccttatggtgctggaagatctagatcgaaccagcttcccaaagctgcctggattccacatgttgaaaacagacagatggcatatgaaaacctgaacgacaaggatcaagaattaggtgagtacttggccaggatgctagttaaataccctgagatcattaattcaaaccaagtgaagcgagttcctggtcaaggctcatctgaagatgacctgcaggaagaggaacaaattgagcaggccatcaaagagcatttgaatcaaggcagctctcaggagactgacaagctggccccggtgagcaaaaggttccctgtggggcccccgaagaatgatgataccccaaataggcagtactgggatgaagatctgttaatgaaagtgctggaatacctcaaccaagaaaaggcagaaaagggaagggagcatattgctaagagagcaatggaaaatatgtaa

SEQ ID NO: 260 - DNA, 2283 bp, Homo sapiens
atgatggatcaagctagatcagcattctctaacttgtttggtggagaaccattgtcatatacccggttcagcctggctcggcaagtagatggcgataacagtcatgtggagatgaaacttgctgtagatgaagaagaaaatgctgacaataacacaaaggccaatgtcacaaaaccaaaaaggtgtagtggaagtatctgctatgggactattgctgtgatcgtctttttcttgattggatttatgattggctacttgggctattgtaaaggggtagaaccaaaaactgagtgtgagagactggcaggaaccgagtctccagtgagggaggagccaggagaggacttccctgcagcacgtcgcttatattgggatgacctgaagagaaagttgtcggagaaactggacagcacagacttcaccggcaccatcaagctgctgaatgaaaattcatatgtccctcgtgaggctggatctcaaaaagatgaaaatcttgcgttgtatgttgaaaatcaatttcgtgaatttaaactcagcaaagtctggcgtgatcaacattttgttaagattcaggtcaaagacagcgctcaaaactcggtgatcatagttgataagaacggtagacttgtttacctggtggagaatcctgggggttatgtggcgtatagtaaggctgcaacagttactggtaaactggtccatgctaattttggtactaaaaaagattttgaggatttatacactcctgtgaatggatctatagtgattgtcagagcagggaaaatcacctttgcagaaaaggttgcaaatgctgaaagcttaaatgcaattggtgtgttgatatacatggaccagactaaatttcccattgttaacgcagaactttcattctttggacatgctcatctggggacaggtgacccttacacacctggattcccttccttcaatcacactcagtttccaccatctcggtcatcaggattgcctaatatacctgtccagacaatctccagagctgctgcagaaaagctgtttgggaatatggaaggagactgtccctctgactggaaaacagactctacatgtaggatggtaacctcagaaagcaagaatgtgaagctcactgtgagcaatgtgctgaaagagataaaaattcttaacatctttggagttattaaaggctttgtagaaccagatcactatgttgtagttggggcccagagagatgcatggggccctggagctgcaaaatccggtgtaggcacagctctcctattgaaacttgcccagatgttctcagatatggtcttaaaagatgggtttcagcccagcagaagcattatctttgccagttggagtgctggagactttggatcggttggtgccactgaatggctagagggatacctttcgtccctgcatttaaaggctttcacttatattaatctggataaagcggttcttggtaccagcaacttcaaggtttctgccagcccactgttgtatacgcttattgagaaaacaatgcaaaatgtgaagcatccggttactgggcaatttctatatcaggacagcaactgggccagcaaagttgagaaactcactttagacaatgctgctttccctttccttgcatattctggaatcccagcagtttctttctgtttttgcgaggacacagattatccttatttgggtaccaccatggacacctataaggaactgattgagaggattcctgagttgaacaaagtggcacgagcagctgcagaggtcgctggtcagttcgtgattaaactaacccatgatgttgaattgaacctggactatgagaggtacaacagccaactgctttcatttgtgagggatctgaaccaatacagagcagacataaaggaaatgggcctgagtttacagtggctgtattctgctcgtggagacttcttccgtgctacttccagactaacaacagatttcgggaatgctgagaaaacagacagatttgtcatgaagaaactcaatgatcgtgtcatgagagtggagtatcacttcctctctccctacgtatctccaaaagagtctcctttccgacatgtcttctggggctccggctctcacacgctgccagctttactggagaacttgaaactgcgtaaacaaaataacggtgcttttaatgaaacgctgttcagaaaccagttggctctagctacttggactattcagggagctgcaaatgccctctctggtgacgtttgggacattgacaatgagttttaa

SEQ ID NO: 261 - DNA, 2283 bp, Homo sapiens; identical to SEQ ID NO: 260

SEQ ID NO: 262 - DNA, 642 bp, Homo sapiens
atggaggccatctggctgtaccagttccggctcattgtcatcggggattccacagtgggcaagtcctgcctgatccgccgcttcaccgagggtcgctttgcccaggtttctgaccccaccgtgggggtggattttttctcccgcttggtggagatcgagccaggaaaacgcatcaagctccagatctgggataccgcgggtcaagagaggttcagatccatcactcgcgcctactacaggaactcagtaggtggtcttctcttatttgacattaccaaccgcaggtccttccagaatgtccatgagtggttagaagagaccaaagtacacgttcagccctaccaaattgtatttgttctggtgggtcacaagtgtgacctggatacacagaggcaagtgactcgccacgaggccgagaaactggctgctgcatacggcatgaagtacattgaaacgtcagcccgagatgccattaatgtggagaaagccttcacagacctgacaagagacatatatgagctggttaaaaggggggagattacaatccaggagggctgggaaggggtgaagagtggatttgtaccaaatgtggttcactcttcagaagaggttgtcaaatcagagaggagatgtttgtgctag

SEQ ID NO: 263 - DNA, 1245 bp, Homo sapiens
atgagcggcctggatgggggcaacaagctccctctcgcccaaaccggcggcctggctgctcccgaccatgcctcaggagatccggaccgagaccagtgccaagggctccgtgaagaaaccgaggcgacacaggtgatggcgaacacaggtgggggcagcctggagaccgttgcggaggggggtgcatcccaggatcctgtcgactgtggccccgcgctccgcgtcccagttgccgggagtcgcggcggtgcagcgaccaaagccgggcaggaggatgctccaccttctacgaaaggtctggaagcagcctctgccgccgaggctgctgacagcagccagaaaaatggctgtcagcttggagagccccgtggccctgctgggcagaaggctctagaagcctgtggcgcagggggcttggggtctcagatgataccggggaagaaggccaaggaagtgacgactaaaaaacgcgccatctcggcagcagtggaaaaggagggagaagcaggggcggcgatggaggaaaagaaggtagtgcagaaggaaaaaaaggtggcaggaggggtgaaagaggagacacggcccagggccccgaagatcaataactgcatggactcactggaggccatcgatcaagagttgtcaaacgtaaatgcccaggctgacagggccttccttcagcttgagcgcaagtttggccgcatgcgaaggctccacatgcagcgcagaagtttcattatccagaatatcccaggtttctgggttactgcctttcgaaaccacccccagctgtcacctatgatcagtggccaagatgaagacatgctgaggtacatgatcaatttggaggtggaggagcttaaacaccccagagcaggctgcaaattcaagttcatctttcagggcaacccctacttccgaaatgaggggcttgtcaaggaatatgaacgcagatcctctggccgggtggtgtctctttccactccaatccgctggcaccgaggccaagacccccaggctcatatccacagaaaccgggaagggaacactatccctagtttcttcaactggttttcagaccacagccttctagaattcgacagaattgcagagattatcaaaggagaactgtggcccaatcccctacaatactacctgatgggtgaagggccccgtagaggaattcgaggcccaccaaggcagccagtggagagcgccagatccttcaggttccagtctggctaa

SEQ ID NO: 264 - DNA, 2211 bp, Homo sapiens
atgaagaaaagcaggagtgtgatgacggtgatggctgatgataatgttaaagattattttgaatgtagcttgagtaaatcctacagttcttccagtaacacacttgggatcgacctctggagagggagaaggtgttgctcaggaaacttacagttaccaccactgtctcaaagacagagtgaaagggcaaggactcctgagggagatggtatttccaggccgaccacactgcctttgacaacgcttccaagcattgctattacaactgtaagccaggagtgctttgatgtggaaaatggcccttccccaggtcggagtccactggatccccaggccagctcttccgctgggctggtacttcacgccacctttcctgggcacagccagcgcagagagtcatttctctacagatcagacagcgactatgacttgtcaccaaaggcgatgtcgagaaactcttctcttccaagcgagcaacacggcgatgacttgattgtaactccttttgcccaggtccttgccagcttgcgaagtgtgagaaacaacttcactatactgacaaaccttcatggtacatctaacaagaggtccccagctgctagtcagcctcctgtctccagagtcaacccacaagaagaatcttatcaaaaattagcaatggaaacgctggaggaattagactggtgtttagaccagctagagaccatacagacctaccggtctgtcagtgagatggcttctaacaagttcaaaagaatgctgaaccgggagctgacacacctctcagagatgagccgatcagggaaccaggtgtctgaatacatttcaaatactttcttagacaagcagaatgatgtggagatcccatctcctacccagaaagacagggagaaaaagaaaaagcagcagctcatgacccagataagtggagtgaagaaattaatgcatagttcaagcctaaacaatacaagcatctcacgctttggagtcaacactgaaaatgaagatcacctggccaaggagctggaagacctgaacaaatggggtcttaacatctttaatgtggctggatattctcacaatagacccctaacatgcatcatgtatgctatattccaggaaagagacctcctaaagacattcagaatctcatctgacacatttataacctacatgatgactttagaagaccattaccattctgacgtggcatatcacaacagcctgcacgctgctgatgtagcccagtcgacccatgttctcctttctacaccagcattagacgctgtcttcacagatttggagatcctggctgccatttttgcagctgccatccatgacgttgatcatcctggagtctccaatcagtttctcatcaacacaaattcagaacttgctttgatgtataatgatgaatctgtgttggaaaatcatcaccttgctgtgggtttcaaactgctgcaagaagaacactgtgacatcttcatgaatctcaccaagaagcagcgtcagacactcaggaagatggttattgacatggtgttagcaactgatatgtctaaacatatgagcctgctggcagacctgaagacaatggtagaaacgaagaaagttacaagttcaggcgttcttctcctagacaactataccgatcgcattcaggtccttcgcaacatggtacactgtgcagacctgagcaaccccaccaagtccttggaattgtatcggcaatggacagaccgcatcatggaggaatttttccagcagggagacaaagagcgggagaggggaatggaaattagcccaatgtgtgataaacacacagcttctgtggaaaaatcccaggttggtttcatcgactacattgtccatccattgtgggagacatgggcagatttggtacagcctgatgctcaggacattctcgataccttagaagataacaggaactggtatcagagcatgatacctcaaagtccctcaccaccactggacgagcagaacagggactgccagggtctgatggagaagtttcagtttgaactgactctcgatgaggaagattctgaaggacctgagaaggagggagagggacacagctatttcagcagcacaaagacgctttgtgtgattgatccagaaaacagagattccctgggagagactgacatagacattgcaacagaagacaagtcccccgtggatacataa

SEQ ID NO: 265 - DNA, 1188 bp, Homo sapiens
atggccgtcaccgacagcctcagccgggctgcgactgtcttggcaactgtgttgctcttgtccttcggcagcgtggccgctagtcatatcgaggatcaagcagaacaattctttagaagtggccatacaaacaactgggctgttctggtgtgtacatcccgattctggtttaattatcgacatgttgcaaataccctttctgtttatagaagtgtcaagaggctaggtattcctgacagtcacattgtcctaatgcttgcagatgatatggcctgtaatcctagaaatcccaaaccagctacagtgtttagtcacaagaatatggaactaaatgtgtatggagatgatgtggaagtggattatagaagttacgaggtaactgtggagaattttttacgggtattaactgggaggatcccacctagtactcctcggtcaaaacgtcttctttctgatgacagaagcaatattctaatttatatgacagggcatggtggaaatggtttcttaaaatttcaagattctgaagaaattaccaacatagaactcgcggatgcttttgaacaaatgtggcagaaaagacgctacaatgagctactgtttattattgatacttgccaaggagcatccatgtatgaacgattttattctcctaacataatggctctagctagtagtcaagtgggagaagattcactctcgcatcaacctgatcctgcaattggagtccatcttatggatagatacacattttatgtcttggaatttttggaagaaattaacccagctagccaaactaatatgaatgacctttttcaggtatgtcccaaaagtctgtgtgtgtctactcctggacatcgcactgatctttttcagagggatcctaaaaatgtactgataactgatttctttggaagtgtacggaaagtggaaattacaacagagactattaaattgcaacaggattcagaaatcatggaaagcagctataaggaagaccagatggatgagaaactaatggaacctctgaaatatgctgaacaacttcctgtagctcagataatacaccagaaaccgaagctgaaagactggcatcctcctgggggctttattctgggattatgggcacttattatcatggttttcttcaaaacttatggaattaagcatatgaagttcattttttag

SEQ ID NO: 266 - DNA, 582 bp, Homo sapiens
atgatccgctgcggcctggcctgcgagcgctgccgctggatcctgcccctgctcctactcagcgccatcgccttcgacatcatcgcgctggccggccgcggctggttgcagtctagcgaccacggccagacgtcctcgctgtggtggaaatgctcccaagagggcggcggcagcgggtcctacgaggagggctgtcagagcctcatggagtacgcgtggggtagagcagcggctgccatgctcttctgtggcttcatcatcctggtgatctgtttcatcctctccttcttcgccctctgtggaccccagatgcttgtcttcctgagagtgattggaggtctccttgccttggctgctgtgttccagatcatctccctggtaatttaccccgtgaagtacacccagaccttcacccttcatgccaaccctgctgtcacttacatctataactgggcctacggctttgggtgggcagccacgattatcctgattggctgtgccttcttcttctgctgcctccccaactacgaagatgaccttctgggcaatgccaagcccaggtacttctacacatctgcctaa

SEQ ID NO: 267 - DNA, 1860 bp, Homo sapiens
atgccgcagctgaacggcggtggaggggatgacctaggcgccaacgacgaactgatttccttcaaagacgagggcgaacaggaggagaagagctccgaaaactcctcggcagagagggatttagctgatgtcaaatcgtctctagtcaatgaatcagaaacgaatcaaaacagctcctccgattccgaggcggaaagacggcctccgcctcgctccgaaagtttccgagacaaatcccgggaaagtttggaagaagcggccaagaggcaagatggagggctctttaaggggccaccgtatcccggctaccccttcatcatgatccccgacctgacgagcccctacctccccaacggatcgctctcgcccaccgcccgaaccctccattttcagtccggcagcacacattactctgcgtacaaaacgattgaacaccagattgcagttcagtatctccagatgaaatggccactgcttgatgtccaggcagggagcctccagagtagacaagccctcaaggatgcccggtccccatcaccggcacacattgtctctaacaaagtgccagtggtgcagcaccctcaccatgtccaccccctcacgcctcttatcacgtacagcaatgaacacttcacgccgggaaacccacctccacacttaccagccgacgtagaccccaaaacaggaatcccacggcctccgcaccctccagatatatccccgtattacccactatcgcctggcaccgtaggacaaatcccccatccgctaggatggttagtaccacagcaaggtcaaccagtgtacccaatcacgacaggaggattcagacacccctaccccacagctctgaccgtcaatgcttccatgtccaggttccctccccatatggtcccaccacatcatacgctacacacgacgggcattccgcatccggccatagtcacaccaacagtcaaacaggaatcgtcccagagtgatgtcggctcactccatagttcaaagcatcaggactccaaaaaggaagaagaaaagaagaagccccacataaagaaacctcttaatgcattcatgttgtatatgaaggaaatgagagcaaaggtcgtagctgagtgcacgttgaaagaaagcgcggccatcaaccagatccttgggcggaggtggcatgcactgtccagagaagagcaagcgaaatactacgagctggcccggaaggagcgacagcttcatatgcaactgtaccccggctggtccgcgcgggataactatggaaagaagaagaagaggaaaagggacaagcagccgggagagaccaatgaacacagcgaatgtttcctaaatccttgcctttcacttcctccgattacagacctgagcgctcctaagaaatgccgagcgcgctttggccttgatcaacagaataactggtgcggcccttgcaggagaaaaaaaaagtgcgttcgctacatacaaggtgaaggcagctgcctcagcccaccctcttcagatggaagcttactagattcgcctcccccctccccgaacctgctaggctcccctccccgagacgccaagtcacagactgagcagacccagcctctgtcgctgtccctgaagcccgaccccctggcccacctgtccatgatgcctccgccacccgccctcctgctcgctgaggccacccacaaggcctccgccctctgtcccaacggggccctggacctgcccccagccgctttgcagcctgccgccccctcctcatcaattgcacagccgtcgacttcttccttacattcccacagctccctggccgggacccagccccagccgctgtcgctcgtcaccaagtctttagaatag

SEQ ID NO: 268 - DNA, 1044 bp, Homo sapiens
agctgcggagcctggaatatggtcggggaaatggaaacgaaggagaagccgaagcccaccccagattacctgatgcagctgatgaacgacaagaagctcatgagcagcctgcccaacttctgcgggatcttcaaccacctcgagcggctgctggacgaagaaattagcagagtacggaaagacatgtacaatgacacattaaatggcagtacagagaaaaggagtgcagaattgcctgatgctgtgggacctattgttcagttacaagagaaactttatgtgcctgtaaaagaatacccagattttaattttgttgggagaatccttggacctagaggacttacagccaaacaacttgaagcagaaaccggatgtaaaatcatggtccgaggcaaaggctcaatgagggataaaaaaaaggaggagcaaaatagaggcaagcccaattgggagcatctaaatgaagatttacatgtactaatcactgtggaagatgctcagaacagagcagaaatcaaattgaagagagcagttgaagaagtgaagaaattattggtacctgcagcagaaggagaagacagcctgaagaagatgcagctgatggagcttgcgattctgaatggcacctacagagatgccaacattaaatcaccagcccttgccttttctcttgcagcaacagcccaggctgctccaaggatcattactgggcctgcgccggttctcccaccagctgccctgcgtactcctacgccagctggccctaccataatgcctttgatcagacaaatacagaccgctgtcatgccaaacggaactcctcacccaactgctgcaatagttcctccagggcccgaagctggtttaatctatacaccctatgagtacccctacacattggcaccagctacatcaatccttgagtatcctattgaacctagtggtgtattaggtgcggtggctactaaagttcgaaggcacgatatgcgtgtccatccttaccaaaggattgtgaccgcagaccgagccgccaccggcaactaa

SEQ ID NO: 269 - DNA, 1053 bp, Homo sapiens
atgtttggcctcaaaagaaacgcggtaatcggactcaacctctactgtgggggggccggcttgggggccggcagcggcggcgccacccgcccgggagggcgacttttggctacggagaaggaggcctcggcccggcgagagatagggggaggggaggccggcgcggtgattggcggaagcgccggcgcaagccccccgtccaccctcacgccagactcccggagggtcgcgcggccgccgcccattggcgccgaggtccccgacgtcaccgcgacccccgcgaggctgcttttcttcgcgcccacccgccgcgcggcgccgcttgaggagatggaagccccggccgctgacgccatcatgtcgcccgaagaggagctggacgggtacgagccggagcctctcgggaagcggccggctgtcctgccgctgctggagttggtcggggaatctggtaataacaccagtacggacgggtcactaccctcgacgccgccgccagcagaggaggaggaggacgagttgtaccggcagtcgctggagattatctctcggtaccttcgggagcaggccaccggcgccaaggacacaaagccaatgggcaggtctggggccaccagcaggaaggcgctggagaccttacgacgggttggggatggcgtgcagcgcaaccacgagacggccttccaaggcatgcttcggaaactggacatcaaaaacgaagacgatgtgaaatcgttgtctcgagtgatgatccatgttttcagcgacggcgtaacaaactggggcaggattgtgactctcatttcttttggtgcctttgtggctaaacacttgaagaccataaaccaagaaagctgcatcgaaccattagcagaaagtatcacagacgttctcgtaaggacaaaacgggactggctagttaaacaaagaggctgggatgggtttgtggagttcttccatgtagaggacctagaaggtggcatcaggaatgtgctgctggcttttgcaggtgttgctggagtaggagctggtttggcatatctaataagatag

SEQ ID NO: 270 - DNA, 924 bp, Homo sapiens
atgaccgagaccaccaagacccacgttatcttgctcgcctgcggcagcttcaatcccatcaccaaagggcacattcagatgtttgaaagagccagggattatctgcacaaaactggaaggtttattgtgattggcgggattgtctcccctgtccacgactcctatggaaaacagggcctcgtgtcaagccggcaccgtctcatcatgtgtcagctggccgtccagaattctgattggatcagggtggacccttgggagtgctaccaggacacctggcagacgacctgcagcgtgttggaacaccaccgggacctcatgaagagggtgactggctgcatcctctccaatgtcaacacaccttccatgacacctgtgatcggacagccacaaaacgagaccccccagcccatttaccagaacagcaacgtggccaccaagcccactgcagccaagatcttggggaaggtgggagaaagcctcagccggatctgctgtgtccgcccgccggtggagcgtttcacctttgtagatgagaatgccaatctgggcacggtgatgcggtatgaagagattgagctacggatcctgctgctgtgtggtagtgacctgctggagtccttctgcatcccagggctctggaacgaggcagatatggaggtgattgttggtgactttgggattgtggtggtgccccgggatgcagccgacacagaccgaatcatgaatcactcctcaatactccgcaaatacaaaaacaacatcatggtggtgaaggatgacatcaaccatcccatgtctgttgtcagctcaaccaagagcaggctggccctgcagcatggggacggccatgttgtggattacctgtcccagccggtcatcgactacatcctcaaaagccagctgtacatcaatgcctccggctag

SEQ ID NO: 271 - DNA, 591 bp, Homo sapiens
atgccaggaatgttcttctctgctaacccaaaggaattgaaaggaaccactcattcacttctagacgacaaaatgcaaaaaaggaggccaaagacttttggaatggatatgaaagcatacctgagatctatgatcccacatctggaatctggaatgaaatcttccaagtccaaggatgtactttctgctgctgaagtaatgcaatggtctcaatctctggaaaaacttcttgccaaccaaactggtcaaaatgtctttggaagtttcctaaagtctgaattcagtgaggagaatattgagttctggctggcttgtgaagactataagaaaacagagtctgatcttttgccctgtaaagcagaagagatatataaagcatttgtgcattcagatgctgctaaacaaatcaatattgacttccgcactcgagaatctacagccaagaagattaaagcaccaacccccacgtgttttgatgaagcacaaaaagtcatatatactcttatggaaaaggactcttatcccaggttcctcaaatcagatatttacttaaatcttctaaatgacctgcaggctaatagcctaaagtga

SEQ ID NO: 272 - DNA, 5634 bp, Homo sapiens
atgctgggcagcagcgtcaagagcgtgcagcccgaggtggagctgagcagcggcggcggcgacgagggcgcggacgaaccgcggggcgccggcaggaaggcggcagcggcggacggcagaggcatgctgcccaagcgcgccaaggcgcccggcggcggcggcggcatggccaaggccagcgcggctgagctgaaggtcttcaagtccggcagcgtggacagccgtgtccccggcgggccgcccgcctccaacctgcgcaagcagaagtcactcaccaacctctcttttctcacggactccgagaaaaagctgcagctttatgagcccgaatggagcgacgatatggccaaggcgcccaaaggcttaggcaaggtggggtccaagggccgtgaagctccgctgatgtccaagacgctgtccaagtcggagcactcgctcttccaggccaagggcagcccggcgggcggcgccaagacccccctggctccgctcgcgcccaacctgggaaagccgagccggatccctcgaggaccctatgcggaggtcaagccgctcagcaaggcgcctgaagcggccgtgagcgaagatggcaaatcggacgacgagctgctctccagcaaggccaaggcgcaaaagagctctgggcctgtcccctctgccaagggccaggaggagcgcgccttcctcaaggtggaccccgagctggtggtgaccgtgctgggagacctggagcagctgctcttcagccagatgctggacccagagtcccagagaaagaggacagtgcagaatgtcctggatctccggcagaacctggaagagaccatgtccagcctgcgagggtcccaggtgactcacagctccctggagatgacctgctacgacagcgatgatgccaacccacgcagcgtgtccagcctctccaaccgctcgtcccctctgtcatggcgctatggccagtccagtccgcggctgcaggctggtgacgcgccctctgtgggtgggagctgccgctcggaggggacgcccgcctggtacatgcacggcgaacgggcccactactcccacaccatgcccatgcgcagccccagcaagctcagccatatctcccgcctggagctggtcgaatccctggactcggatgaggtggacctcaagtccggctacatgagcgacagtgacctcatgggcaagaccatgacggaggatgatgacatcactaccggctgggatgaaagcagctccatcagtagtggactcagcgatgcctcagacaatctcagttcagaagaattcaatgccagctcctcactcaactccctcccaagtactcccactgcttctcgcaggaactcaacaatagtgctacgcacagactcagagaagcgctcactggcagaaagtgggctgagctggtttagtgaatcagaggagaaagcccctaaaaaactggagtacgacagtggtagcctgaagatggaacctgggacttctaagtggcggagggagcggcctgagagctgtgatgattcatccaagggtggagaactgaaaaagcccatcagcctgggccaccctggttccctgaagaagggcaagaccccacctgtggctgtaacttcccccatcactcacacagcccagagtgccctcaaagtcgcaggcaaacctgagggcaaagctacagacaagggtaagcttgcagtgaagaatactgggctccaacgctcctcctctgatgctggtcgggaccgcctgagtgatgctaagaagcccccctcgggcattgctcgcccctccacttcgggatcctttggctacaagaagcctcctcctgccacaggcacagccactgtcatgcaaactggtggttcagccactctcagcaagatccagaagtcctcaggcatccctgtcaagccagtaaatgggcgcaagactagcttagatgtttccaacagtgcagagccaggattcctggctcctggagcccgttctaacatccagtaccgcagcctgccccggccagccaagtcaagttctatgagcgtgaccggcgggcggggtggacctcgccctgtgagcagcagcattgaccccagtctcctcagcaccaagcagggaggccttacgccttccagactgaaggagcctaccaaggtagccagtgggcggaccactccagcccctgtcaatcagacagatcgggaaaaggagaaggccaaagccaaggcagtggccttggactcagacaacatctccttgaagagtattggctccccagaaagtactcccaagaaccaagcaagccaccccacagccaccaagctggcagagctgccaccaacccctctcagggccacagcgaagagctttgtcaaaccaccctcactagccaatcttgacaaggtcaactccaacagtctggatctaccatcatccagtgataccacccatgcttcaaaggtcccagatctgcatgctacaagctcagcatctgggggccctctcccttcctgcttcacccccagtccggcacccatcctcaatattaactcagccagcttctcccagggcctggagctaatgagtggtttcagtgtgccaaaagagacccgcatgtaccccaaactctcaggcctgcacaggagcatggagtccctccagatgccaatgagcctccccagtgccttccccagcagtactcccgtccccaccccacctgctccccctgctgctcccacagaagaagagacggaagagctgacttggagtggaagccccagagctgggcaactggacagtaatcagcgggatcggaacactcttcccaagaaagggctcaggtaccagcttcagtcccaggaggagaccaaggagaggcgacattcccataccattggtgggctgcctgaatccgatgaccagtcagagctgccttctccccctgcacttcccatgtctctgagtgcaaagggccaacttaccaacatagtgagtcccactgcggccaccacgccaagaatcacccgctccaacagcatccccacccacgaggcggccttcgagctgtacagcggctcccaaatggggagcaccctgtccctggccgagagacccaagggaatgattcggtcaggatccttccgagaccccacggacgatgttcacggctcagtgctgtccctggcctccagtgcctcctccacctactcctcagctgaggagaggatgcaatctgagcaaatccggaagcttcgtagggaactggaatcatcccaggaaaaagtggccaccttgacgtctcagctttctgccaatgctaatctggtggctgcttttgagcagagcctggtgaatatgacatcccgcctgcgacacctggcagagacggccgaggagaaggacactgagctgctggatttgcgagaaaccatagactttctgaagaaaaagaactctgaggcccaggcagtcattcagggagcccttaatgcctcagaaaccacacccaaagaacttcggatcaagagacaaaactcctcagatagcatctcaagcctcaacagcatcactagccattccagcatcggcagcagcaaggatgctgatgcgaaaaagaagaaaaaaaagagttgggtctatgagcttcgaagttccttcaacaaagcgttcagtataaaaaaggggcccaagtcagcttcctcatactcggatatagaggagattgctacacccgactcttcagccccctcatcccccaaactacagcatggttctacagagactgcttcaccctccatcaagtcctccacctcgtcctccgtgggcactgatgtcaccgagggccctgctcacccagccccccacactaggctgttccatgcaaatgaggaggaggagccagagaagaaggaggtatcggagctgcgctctgagctatgggagaaggaaatgaagcttacagacatccgcttggaggccctcaactctgcccaccaactggatcagcttcgggagaccatgcacaacatgcagttggaggtggacctgctgaaagcagagaatgaccgactgaaggtagccccaggcccctcatcaggctccactccagggcaggtccctggatcatctgcattatcttccccacgccgctccctaggcctggcactcacccattccttcggccccagtcttgcagacacagacctgtcacccatggatggcatcagtacttgtggtccaaaggaggaagtgaccctccgggtggtggtgaggatgcccccgcagcacatcatcaaaggggacttgaagcagcaggaattcttcctgggctgtagcaaggtcagtggaaaagttgactggaagatgctggatgaagctgttttccaagtgttcaaggactatatttctaaaatggacccagcctctaccctgggactaagcactgagtccatccatggctacagcatcagccacgtgaaacgagtgttggatgcagagccccccgagatgcctccttgccgtcgaggtgtcaataacatatcagtctccctcaaaggtctgaaggagaaatgcgtcgacagcctggtgttcgagacgctgatccccaagccgatgatgcagcactacataagcctcctgctgaagcaccggcgcctcgtcctctcgggccccagcggcacgggcaagacctacctgaccaatcgcttggccgagtacctggtggagcgctctggccgtgaggtcacagagggcatcgtcagcaccttcaacatgcaccagcagtcttgcaaggatctgcaactgtatctttccaacctagccaaccagatagaccgggaaacaggaattggggatgtgcccctggtgattctattggatgacctgagtgaagcaggctccatcagtgagttggtcaatggggccctcacctgcaagtatcataaatgtccctatattataggtaccaccaatcagcctgtaaaaatgacacccaaccatggcttgcacttgagcttcaggatgttgaccttctccaacaacgtggagccagccaatggcttcctggttcgttacctgaggaggaagctggtagagtcagacagcgacatcaatgccaacaaggaagagctgcttcgggtgctcgactgggtacccaagctgtggtatcatctccacaccttccttgagaagcacagcacctcagacttcctcatcggcccttgcttctttctgtcgtgtcccattggcattgaggacttccggacctggttcattgacctgtggaacaactctatcattccctatctacaggaaggagccaaggatgggataaaggtccatggacagaaagctgcttgggaggacccagtggaatgggtccgggacacacttccctggccatcagcccaacaagaccaatcaaagctgtaccacctgcccccacccaccgtgggccctcacagcattgcctcacctcccgaggataggacagtcaaagacagcaccccaagttctctggactcagatcctctgatggccatgctgctgaaacttcaagaagctgccaactacattgagtctccagatcgagaaaccatcctggaccccaaccttcaggcaacactttaa

SEQ ID NO: 273 - DNA, 612 bp, Homo sapiens
atgggcagccgcgaccacctgttcaaagtgctggtggtgggggacgccgcagtgggcaagacgtcgctggtgcagcgatattcccaggacagcttcagcaaacactacaagtccacggtgggagtggattttgctctgaaggttctccagtggtctgactacgagatagtgcggcttcagctgtgggatattgcagggcaggagcgcttcacctctatgacacgattgtattatcgggatgcctctgcctgtgttattatgtttgacgttaccaatgccactaccttcagcaacagccagaggtggaaacaggacctagacagcaagctcacactacccaatggagagccggtgccctgcctgctcttggccaacaagtgtgatctgtccccttgggcagtgagccgggaccagattgaccggttcagtaaagagaacggtttcacaggttggacagaaacatcagtcaaggagaacaaaaatattaatgaggctatgagagtcctcattgaaaagatgatgagaaattccacagaagatatcatgtctttgtccacccaaggggactacatcaatctacaaaccaagtcctccagctggtcctgctgctag

SEQ ID NO: 274 - DNA, 1488 bp, Homo sapiens
atggcccaggggaataattatgggcagaccagcaacggggtggccgatgaatcacccaacatgctggtgtacagaaagatggaagacgtcatagcacggatgcaagatgaaaaaaatggaattcctattcgtacggtcaaaagctttctttccaagatacctagcgtcttctctggttcagacattgttcaatggttgataaagaacttaactatagaagatccagtggaggcgctccatttgggaacattaatggctgcccacggctacttctttccaatctcagatcatgtcctcacactcaaggatgatggcaccttttaccggtttcaaaccccctatttttggccatcaaattgttgggagccggaaaacacagattatgccgtttacctctgcaagagaacaatgcaaaacaaggcacgactggagctcgcagactatgaggctgagagcctggccaggctgcagagagcatttgcccggaagtgggagttcattttcatgcaagcagaagcacaagcaaaagtggacaagaagagagacaagattgaaaggaagatccttgacagccaagagagagcgttctgggacgtgcacaggcccgtgcctggatgtgtaaatacaactgaagtggacattaagaagtcatccagaatgagaaacccccacaaaacacggaagtctgtctatggtttacaaaatgatattagaagtcacagtcctacccacacacccacaccagaaactaaacctccaacagaagatgagttacaacaacagataaaatattggcaaatacagttagatagacatcggttaaaaatgtcaaaagtcgctgacagtctactaagttacacggaacagtatttagaatacgacccgtttcttttgccacctgacccttctaacccatggctgtccgatgacaccactttctgggaacttgaggcaagcaaagaaccgagccagcagagggtaaaacgatggggttttggcatggacgaggcattgaaagacccagttgggagagaacagttccttaaatttctagagtcagaattcagctcggaaaatttaagattctggctggcagtggaggacctgaaaaagaggcctattaaagaagtaccctcaagagttcaggaaatatggcaagagtttctggctcccggagcccccagtgctattaacttggattccaagagttatgacaaaaccacacagaacgtgaaggaacctggacgatacacatttgaagatgctcaggagcacatttacaaactgatgaaaagtgattcatacccacgttttataagatccagtgcctatcaggagcttctacaggcaaagaaaaagtctggaaactcaatggatcgcagaacatcttttgaaaaatttgcacagaatgtgggcagaaacatccctattttcccatgccataaaaactgtacaccaacactgagggccagcactaacctgttatga

SEQ ID NO: 275 - DNA, 1632 bp, Homo sapiens
atgggctgcattaaaagtaaagaaaacaaaagtccagccattaaatacagacctgaaaatactccagagcctgtcagtacaagtgtgagccattatggagcagaacccactacagtgtcaccatgtccgtcatcttcagcaaagggaacagcagttaatttcagcagtctttccatgacaccatttggaggatcctcaggggtaacgccttttggaggtgcatcttcctcattttcagtggtgccaagttcatatcctgctggtttaacaggtggtgttactatatttgtggccttatatgattatgaagctagaactacagaagacctttcatttaagaagggtgaaagatttcaaataattaacaatacggaaggagattggtgggaagcaagatcaatcgctacaggaaagaatggttatatcccgagcaattatgtagcgcctgcagattccattcaggcagaagaatggtattttggcaaaatggggagaaaagatgctgaaagattacttttgaatcctggaaatcaacgaggtattttcttagtaagagagagtgaaacaactaaaggtgcttattccctttctattcgtgattgggatgagataaggggtgacaatgtgaaacactacaaaattaggaaacttgacaatggtggatactatatcacaaccagagcacaatttgatactctgcagaaattggtgaaacactacacagaacatgctgatggtttatgccacaagttgacaactgtgtgtccaactgtgaaacctcagactcaaggtctagcaaaagatgcttgggaaatccctcgagaatctttgcgactagaggttaaactaggacaaggatgtttcggcgaagtgtggatgggaacatggaatggaaccacgaaagtagcaatcaaaacactaaaaccaggtacaatgatgccagaagctttccttcaagaagctcagataatgaaaaaattaagacatgataaacttgttccactatatgctgttgtttctgaagaaccaatttacattgtcactgaatttatgtcaaaaggaagcttattagatttccttaaggaaggagatggaaagtatttgaagcttccacagctggttgatatggctgctcagattgctgatggtatggcatatattgaaagaatgaactatattcaccgagatcttcgggctgctaatattcttgtaggagaaaatcttgtgtgcaaaatagcagactttggtttagcaaggttaattgaagacaatgaatacacagcaagacaaggtgcaaaatttccaatcaaatggacagctcctgaagctgcactgtatggtcggtttacaataaagtctgatgtctggtcatttggaattctgcaaacagaactagtaacaaagggccgagtgccatatccaggtatggtgaaccgtgaagtattagaacaagtggagcgaggatacaggatgccgtgccctcagggctgtccagaatccctccatgaattgatgaatctgtgttggaagaaggaccctgatgaaagaccaacatttgaatatattcagtccttcttggaagactacttcactgctacagagccacagtaccagccaggagaaaatttataa

SEQ ID NO: 276 - DNA, 1017 bp, Homo sapiens
atgaccaccaccctcgtgtctgccaccatcttcgacttgagcgaagttttatgcaagggtaacaagatgctcaactatagtgctcccagtgcagggggttgcctgctggacagaaaggcagtgggcacccctgctggtgggggcttccctcggaggcactcagtcaccctgcccagctccaagttccaccagaaccagctcctcagcagcctcaagggtgagccagcccccgctctgagctcgcgagacagccgcttccgagaccgctccttctcggaagggggcgagcggctgctgcccacccagaagcagcccgggggcggccaggtcaactccagccgctacaagacggagctgtgccgcccctttgaggaaaacggtgcctgtaagtacggggacaagtgccagttcgcacacggcatccacgagctccgcagcctgacccgccaccccaagtacaagacggagctgtgccgcaccttccacaccatcggcttttgcccctacgggccccgctgccacttcatccacaacgctgaagagcgccgtgccctggccggggcccgggacctctccgctgaccgtccccgcctccagcatagctttagctttgctgggtttcccagtgccgctgccaccgccgctgccaccgggctgctggacagccccacgtccatcaccccaccccctattctgagcgccgatgacctcctgggctcacctaccctgcccgatggcaccaataacccttttgccttctccagccaggagctggcaagcctctttgcccctagcatggggctgcccgggggtggctccccgaccaccttcctcttccggcccatgtccgagtcccctcacatgtttgactctccccccagccctcaggattctctctcggaccaggagggctacctgagcagctccagcagcagccacagtggctcagactccccgaccttggacaactcaagacgcctgcccatcttcagcagactttccatctcagatgactaa

SEQ ID NO: 277 - DNA, 1482 bp, Homo sapiens
atgatgacaacgttgcagaataaagaagaatgtggaaagggaccaaagagaatctttgccccacctgcacaaaaatcttacagcctgttaccttgtagccctaactcccctaaggaggagaccccggggatcagttccccagagacagaggccaggataagcctgccaaaggccagtttaaagaagaaagaggaaaaagcaaccatgaagaatgttccaagcagggaacaggagaaaaaaagaaaggcacaaatcaacaagcaagcagagaagaaagaaaaggaaaaatcaagtcttaccaatgcagaatttgaggagattgtccagattgttctgcagaagtcccttcaggagtgcttggggatgggatctggccttgattttgcagagacttcttgtgcccagcccgtagtatctacccaatcagacaaggagccaggaattactgcttctgctactgatactgataatgctaatggagaggaggtaccacatactcaagagatttcagtgtcttgggaaggtgaagctgcccctgagataaggacatctaagttaggccagccagatcctgcaccctctaagaagaaatccaatagactcaccttaagcaaaagaaagaaggaagctcatgagaaggtggagaaaactcaaggtggacatgagcacagacaggaagaccgactaaagaaaacagttcaggatcattctcagatcagggaccagcaaaaaggagagataagtggttttggtcaatgtctggtctgggtccagtgttccttcccaaactgtgggaaatggaggcggctgtgtgggaacattgacccctcagttctcccagataattggtcctgtgatcagaacacagatgtgcagtataatcgctgtgatattcctgaggagacctggacagggcttgagagtgatgtggcctatgcctcctacatcccaggatccatcatctgggccaagcaatacggttacccctggtggccaggcatgatagaatctgatcctgacttaggggaatattttctttttacttcccatcttgattccctgccgtctaagtaccatgtgacgttttttggagaaacagtttctcgtgcatggatcccagtcaacatgctaaagaacttccaggagctgtccctggagctatcagtcatgaaaaagcgcagaaatgactgcagccagaaactgggggtggccctgatgatggctcaagaggcagaacagatcagcattcaggaacgggttaacttgtttggtttctggagccgattcaacggatctaacagtaatggggaaagaaaagacttacagctctctggtttgaacagcccaggatcctgcttagagaaaaaggagaaagaggaagagttggaaaaggaggaaggagagaaaacagacccaattttgcccattcgtaagcgagtcaaaatacagacccaaaaaaccaagccaagagtgtcatgggga

SEQ ID NO: 278 - DNA, 1365 bp, Homo sapiens
atggatcccgggcagcagccgccgcctcaaccggccccccagggccaagggcagccgccttcgcagcccccgcaggggcagggcccgccgtccggacccgggcaaccggcacccgcggcgacccaggcggcgccgcaggcaccccccgccgggcatcagatcgtgcacgtccgcggggactcggagaccgacctggaggcgctcttcaacgccgtcatgaaccccaagacggccaacgtgccccagaccgtgcccatgaggctccggaagctgcccgactccttcttcaagccgccggagcccaaatcccactcccgacaggccagtactgatgcaggcactgcaggagccctgactccacagcatgttcgagctcattcctctccagcttctctgcagttgggagctgtttctcctgggacactgacccccactggagtagtctctggcccagcagctacacccacagctcagcatcttcgacagtcttcttttgagatacctgatgatgtacctctgccagcaggttgggagatggcaaagacatcttctggtcagagatacttcttaaatcacatcgatcagacaacaacatggcaggaccccaggaaggccatgctgtcccagatgaacgtcacagcccccaccagtccaccagtgcagcagaatatgatgaactcggcttcagccatgaaccagagaatcagtcagagtgctccagtgaaacagccaccacccctggctccccagagcccacagggaggcgtcatgggtggcagcaactccaaccagcagcaacagatgcgactgcagcaactgcagatggagaaggagaggctgcggctgaaacagcaagaactgcttcggcaggtgaggccacaggagttagccctgcgtagccagttaccaacactggagcaggatggtgggactcaaaatccagtgtcttctcccgggatgtctcaggaattgagaacaatgacgaccaatagctcagatcctttccttaacagtggcacctatcactctcgagatgagagtacagacagtggactaagcatgagcagctacagtgtccctcgaaccccagatgacttcctgaacagtgtggatgagatggatacaggtgatactatcaaccaaagcaccctgccctcacagcagaaccgtttcccagactaccttgaagccattcctgggacaaatgtggaccttggaacactggaaggagatggaatgaacatagaaggagaggagctgatgccaagtctgcaggaagctttgagttctgacatccttaatgacatggagtctgttttggctgccaccaagctagataaagaaagctttcttacatggttatag

SEQ ID NO: 279 - DNA, 1623 bp, Homo sapiens
cagccgtccgagagccctgcgcccgcgcctccccttgcgcaccgtggcagcgcccggcgggcggtcctgccagccccgacgggatgcccgcagccatgctcccctacgcttgcgtcctggtgcttttgggagcccacactgcaccggcggctggggaggccgggggcagctgcctgcgctgggaaccccactgccagcagcccttgccagatagagtgcccagcactgcgatcctgcctccacgccttaatggaccttggatctccacaggctgcgaggtgcgcccaggaccggagttcctgacccgcgcctacaccttctaccccagccggctctttcgagcccaccagttctactacgaggaccccttctgcggggaacctgcccactcgctgctcgtcaagggcaaagtccgcctgcgccgggcctcctgggtcacccggggagccaccgaggccgactaccacctgcacaaggtgggcatcgtcttccacagccgccgggccctggtcgacgtcaccgggcgcctcaaccagacccgcgccggccgggactgcgcgcggcggctgcctccggcccgggcctggctgcctggggcgctgtacgagctgcggagcgcccgggctcagggggactgcctggaggcgctgggcctcaccatgcacgagctcagcctggtccgcgtgcagcgccgcctgcagccgcagccccgggcgtcgccccggctggtggaggagctgtacctgggggacatccacaccgacccggcggagaggcggcactaccggcccacgggctaccagcgcccgctgcagagcgcactgcaccacgtgcagccgtgcccagcctgtggcctcattgcccgctccgatgtgcaccacccgcccgtgctgccgccccctctggccctgcccctgcacctgggcggctggtgggtcagctcggggtgcgaggtgcgcccagcagtcctgttcctcacccggctcttcactttccacgggcacagccgctcctgggaagggtattaccaccacttctcagacccagcctgccggcagcccaccttcaccgtgtatgccgccggccgctacaccaggggcacgccatccaccagggtccgcggcggcaccgagctggtgtttgaggtcacacgggcccatgtgacccccatggaccaggtcaccacggccatgctcaacttctctgagccaagcagctgtgggggtgcgggggcctggtccatgggcactgagcgggatgtcacagccaccaacggctgcctaccgctgggcatccggctcccgcatgtggagtacgagcttttcaagatggaacaagaccccctcgggcaaagcctgctcttcatcggacaaaggcccaccgatggctcaagtcccgataccccagagaaacgtcccacctcctaccaagcacccctggtgctctgtcatggggaggcccccgacttctccaggccaccgcagcacaggccatcgctgcagaagcaccccagcacagggggtcttcacatagcccccttcccacttctgcccctagttctagggctggccttcctccactggctatgacattggacttgacatcaggatggcggctctggac

SEQ ID NO: 280 - DNA, 4024 bp, Homo sapiens
gtgaggctgccgagcggacagcgactcccggggaagcccgcgctccgggagcgggagcgggagcaggagcaggagcagcgccgtcccaggccagaggcgagcgccgggcgccgggagagcggagagcccgggcagctgccggagcgcgggggcgcggcccgaggaaaccacagagcgagcccaggcctggggagggcgccgaacatctgaggcggcttcgcgggagacaaagccgcgcgtagagacgcgatgcccgccgatcgcgagcccggccggcgagggcgcggggactgcggcgtctgagcgcgccaagccgtgcgcccgcggggacgccgagccccggggccggtgcgggcggcggcgggcggggcccaggtgcgcccggccgcgtcgggcccgtgactgctcggggggcggcgccctcccgccgcagccgcagtggctggcgccgcagccaggagccatgggcaacatctcctctaacatctcggccttccagtccctgcatatcgtcatgttgggcttggactcggccggcaagaccacggtgctctaccggctcaagttcaacgagttcgtgaacacggtgcccaccatcggcttcaacaccgagaagatcaagctgagcaacggcacggccaagggcatcagctgccacttctgggacgtgggcggccaggagaagctgcggccgctgtggaagtcctacagccgctgcacggacggcatcatctacgtggtggactcggtggacgtggaccggctggaggaggccaagacggagctgcacaaggtgaccaagttcgccgagaaccagggcacgccgctgctggtcatcgccaacaagcaggacctgcccaagtcgctgccggtggcagagattgagaagcagctggcgctgcacgagcttatcccggccaccacctatcacgtccagccggcgtgcgccatcatcggcgagggcctcaccgagggcatggacaagctctatgagatgatcctgaaacgcaggaagtccctcaagcagaagaagaagcggtaatgcgcccggagcgaccggggagcgagcgagtgcgtcaagaaagaatgaatggatggatggatggttggatggatggatggatggatgagcgagaacccgcgcccgcgaacaaagagcgaaccaaagcgatgcttcgaatttttaaaacggaatctctgcacccaaatgcaggactggtgacttaaggagctgcgaagtctgatttaccggcctactctcgacctgccccccacccccagctcaggggaccttttgtctgaacgccagagctactgaccaggtcggggggccgcggtggggagtggaagagccggtcctgctgtccgccctcccagccccaggtggaaggctcagttgtcggaaagacaaaagcgatttcttcccactcctgcagggccagaagttcaggctgccccgcctccactgggggatcgcacctgtgaattacctgaggtatgcatttcccagaaccgtgggcgtacccaccttggggggcatgttggttctggggggaccacctctccttgcattcaggggctgtgaagctgagtaattttcggtcacagggcaggcccctgttgaaatttcatttgtcctgctctgggcccaaaggtggtggtggtttgggtcatcagaggactgcctgggacggttcagcgggcacggagcgctgtgctggcctggctggggatggccgcggaggtgcccttttcctggtgctttgtggtggctgcagaagaccagttttgttgagaactgcttttcagcctggaatcagacatcttccagatggtttggaccctgtccatgtgtaggtcattatcacacaaagagaccaataaaaataaaaaaaataaaaaaaaaaaaagacgaactattggaggtggtggccaatgatgcatttactgtttgcaggatagttaaaggtgtttaaagggtaaggcttttggtgtaaatgctggatggggtgtgtgtgtgtgtggatatagggacctccctctgtactgtgtactgtgtaatcggcattaatacctagactcatatgtatggaattttaaattctcttagcctactgattggtttggatgagcacaccagctgcaggtgtgtgctgaattgcaagatggtatttttttttttaaccaagggatgtctcttgtaatactaaccgcgtgataatgggttttcagacatgatgaaaaaaaaaaacttttacaaatgaatacttaccttagaaatattcaccttaggaaaaaagactttgctctgcccttttatattcctttatgctgcaagtggtgacatgttcagatttctaatttggttcattgtggcctatctggtttaagtctttcattaaaaatgtctcgttagagtatttgatgtcatgcaccaaaaaaataaaaccccaccttgttgcaaaagctgacctcgttgcatggaattaaaagagaaggaaaaacacaaggatgaagtctttccgaattcattcttgtgggaactggccttcggagccagccagcactttgggcaaatgcaaacaacaatgagtgcttgagataaaagaaagtgtgacgtcatggtcactggtactcaggcacttcacagtttacttgaaagaggctttggaaaatagataaagtgaaagaagaataaatacatatttttaataatgtaattttaaaaatcctttataatcaggactgagtcttggtttgcagaagctgtcacttaccctgaaacacagtatcaaaagggaaacttaaaacatactgtttgatttttttatttcctcttacaatccatgttttcaggtagaattatgactttccccccattgttacacatttctttacaaaggaggcctgtagaaattggacacgatcatgcttgagcatgtgagttagtcaaattatgagtccctgcctattgtccattacacaccgaatgttaatttaagaaccagaggcagaagttctggcttcctgcttgaaacccaattcttatatgaaattttttaaaagcagaaacctagcagcccatctgctttttctcttttgtcggtgtatttggtacccctccaatgctggtctttttgtagaaactcagtagagaaagtctagctaagcagtgttgaaaagcctgcaagatttcagtttacatatcgacagcatatccactgatttctaaatgggctggtcccatcatctgaagattctgtatagaattattaaaaaaaaaatccatctttctttattttcttcacatgcgacaatttcttaagcactttgacattttggtagttccacactattgagagaataatatatttattttgtgacattgcagatgccaaatactgtaaccttctcatgataacaatacttaggttcaagatcactgttcaaaccctgtcatgctttaaaactgatgcgagatgattttgttttttgcataatcaatacttaagggtgcaatcaactgttagtaattgtgcagtaaagtaaagccctgtggtgtatcaactactagttaagagtctcagttgatttctgtaatgtttgacctaataatagcccgtttcgtctctgacccaacagaggaagcacagatcaaatcaccttggagtggtcaccagggggacagggagccccccaccaatgtatcaatgggtgatttatgatgccttctgccctttggcgagtgaatgggtttcccataggggaagttggcctccctccgtgagctttggaaatgttttctaatagacacagggaggccagttctgtttcagagcaattatcttcccaaattctctgttctggtgttggaactgtgtgccctggtttctgttttcctttctactgctgtaattctctgtctcatcatccttctcttttgtttccatagccttttataatgcatatatgatgctgtgaacagaaataaattatttatacaatcaaaaaaaaaaaaaaaaaa

SEQ ID NO: 281 - DNA, 4573 bp, Homo sapiens
agctcagtgtcacagacctttgtggaagcaacaacagctcccatccttccaacctttctggagaagccgtggcctgatggtgagccgaatgggctggggggggagaagaaggcggctggggcggtggggagatctggggcccggatcggtgcccctcctccccatgccactgccacctcctcctcctccttcatgccggggacctgggggagggaggatctccatcttctctctgtcccctgcccctcatacaagaagctccccctcctcattttcccctcccaccgcagggcccccttgctcagtgctacaggggacaggggcttctcagtcttgccacagtgctctccctatcccagccacccccccaacacaggctcaacctgcaatgacacctgcctctgcatctccctcctggggatcccactccaccccacccctggccccggcaacccccactccctcacagcagtgcccccaggactctcctgggctgcgggtaggccctttgatccctgaacaggattatgagcggctggaggactgtgaccctgaggggtcccaagactcacccatccacggggaggagcagcaacccctgcttcatgtccctgaagggctccgaggctcctggcatcacatccagaacctggacagtttcttcaccaagatctacagctaccaccagcggaatggctttgcctgcatcttgctggaggatgtcttccagctgggacaatttattttcattgtcaccttcacaaccttcctccttcgatgcgtggattacaatgttctctttgccaaccaaccaagtaaccataccagacctgggccgttccacagcaaagtgaccctgtcagatgccatcctaccctcagcccagtgtgctgagaggatccgctccagcccgctgctggtcctcctcctggtcctggctgccggcttctggctggtccaactgcttcgctcagtctgcaacctcttcagctactgggacatccaggtgttttacagggaggccctgcacatccccccggaggagctgagctcggttccctgggcagaggtgcagtcccgcctcttggcactgcagcggagcgggggcctgtgcgtgcagccgcggcccctgacggagctggacatccaccaccgcatcctgcgctacaccaactaccaggtggcgctggccaacaaaggcctgctgccggcccgctgcccgctgccctggggaggcagtgcggctttcctcagccgcggcctggcgctcaatgtcgacctgctgctcttccgcggtcccttctcgctcttccgcgggggctgggagctgccgcacgcctacaagcgcagcgaccagcggggcgccctagcagcgcgctgggggcgcacagtgctgctgctggccgccctgaacctggcgctgagcccgctggtgctggcctggcaggttctgcacgtcttctatagccacgtggagctgctgcggcgcgagcctggcgcgctgggggcgcgcggctggtcccgcctggcgcgcttgcagctgcgccacttcaacgagctgccgcacgagctgcgcgcgcgcctggcccgcgcctaccgccccgccgccgccttcctgcgcaccgctgcgccccccgcgcccctgcgcacgctgctggcccgccagctcgttttcttcgcgggtgcactcttcgccgcgctgcttgtgctcaccgtctacgacgaggacgtgctagccgtggagcacgtgctcaccgccatgaccgcgctcggggtcaccgccaccgtcgccaggtctttcattccggaagagcagtgccagggtcgtgcgccgcagctcctgctgcagacagccctggcccacatgcactacctcccggaggagcccggccccggcggcagggaccgcgcctaccggcagatggcgcagctgctgcagtaccgagcggtctccctcctggaggagctcctgtccccgctcctcaccccgctgtttctgcttttctggttccgccctcgtgccctggagattatcgacttttttcatcacttcactgtggatgtggctggggttggggacatctgttcctttgcccttatggatgtgaagcgccacggacaccctcagtggctctcggcgggacagactgaggcctcgctgtctcagcgtgcggaggacggcaagactgagctttctttgatgcggttctccctggcgcatccactctggcgccccccagggcacagctctaagtttcttgggcacctctggggccgagtacaacaagatgcagctgcctggggtgccacctcggctcgcggcccctccaccccgggggtgctcagcaactgcacctcgcccctgcctgagccttcctggccaacctcttcgtgcaccctctcctgcctccgagagatctgagcccgacagccccctgtccagctgcggccacagccagcctccttgcctccatttcccgaattgcccaggaccccagctctgtgtccccaggaggcactgggggccagaagctggcccagctcccagaacttgcttctgccgagatgagtctccatgtcatctacctgcaccagcttcaccagcagcagcagcagcaggagccgtggggtgaggctgcagcctccatcctgtccaggccctgctccagcccctcacagccaccctcgcctgatgaggagaagccatcctggtcaagtgacggctccagtcctgcctctagccccagacaacagtggggaacccagaaggcccggaatctgttccccggagggtttcaggtgaccacagacacccagaaggagcctgaccgggcctcttgcactgactgagacgactcctcagggccccactcctggcagctgagtgctgcacctgccttctcgatcacgagcctgagaactgcacgggggagcagcccagactggctggaaaccatgttttcagagtgcagggtcaagtggcgtcctctggacagatgtgagaaggcaccacctcaagaggggaggagcggggctgatcctggtcgggcggacctgagtcgggcagccgctctcccggaactggaagggaaagccaggcggctctcaggggctgttggtgtctgagccgggagggtcgaacgcccagggcactgcgccccgcaactgacgctcctgcaaggaaaagctctggcacgccgatgacgtcgccggcctcgtccagctccatgtcgccctccgtcgccaggatgcgctgcacggtctgcaggacgttggttgccatggtaacatcgccgcagacaaacatgtggccccgctcgaggcacagcacgcggtgcacctccgcagccagctccgtcctcaggatgtcctgcacgttaccattgcgccctcagggtctcacaccttggggttgtcaggttcccgggagaaggcggtgaggactcggccaaacaccccgcgctgctgggcgttctgcacctcgtcgcggtagagatggtcaagttgggagcatcggcagccgaacaccaaagtcatgggagtgggctgcagccctgcaagcaaccccgcgcttgggaaggctcttctccggggcacagtgctagtggggcctccccacaggccaccgtcgcccagcctggcagcccagcgttttgggctgaaaccaccattactttggctgtttcatctctaagagagtgtagaatgctttcacagagaccctgcacagccctgatttacagagggaagggaagcgcgggtgaggtggtggcccctggtggagctgcgctagaatgcgcggcttcggactcagaattccatgccctttgcattgtgtgacatcgcagtccccttccccgctcccacttcatattctcccatacttataactctcctcccagtcacagccctcttcttttgattgacagaccaccctgggcaccccatgctcaatatgaacaccttgtagcatccttaggtcttggacagacctcggtcagctctggcacagtcaagaatccaccttgggcagttcttctttgagtcttagccctaatccctttgaaaattctattttcctttgtcctcaatccagtcaacacctactatgtaccaggcaccaggaagccagaagctcagggcccagcccttgcctttggtacctgccctccccttggtctcatgagcgtcttttcagctttgtggactttgtttcctgccctctctttcctatttcctgccttccagccccacccctctgtccctagattgtgtgactcccttcaggcagtcctttagtccccagcctcacctttgctctcaatgtcatgcagccgctcctgccagaatccccggaagggggcaatgccagtgcctggacccaccaggatgcagggcaagctgggatcgggtggcagccggaaggagggagccctggcaggagagacactccatcaggtcccctttgcctttcctgctccaccattctcaccatgcagggtgggtggagcaaggaggacccaagttcttcccatctcaaaaaaaaattaaaaaaaaaacaaaaaacaaaaaa

SEQ ID NO: 282 - DNA, 2894 bp, Homo sapiens
cggggtcagcaccgcggagacccccctcgcccggccccgcgacagcctccgagcgcccccggatcatggccaccgaggtccacaatctgcaggagctccggcgaagtgcctcactggccaccaaggtctttatccagagagactacagcgatgggaccatctgtcagttccagaccaaattccccccagagctggacagccggatcgagcggcagctctttgaagagactgtgaagaccctcaacggattttacgcagaggctgagaagattgggggcagctcctacctcgagggctgcctggcctgcgccacggcctacttcatcttcctctgcatggagacccactatgagaaggttctcaagaagatttcccgctacatccaggagcagaatgagaagatctttgcacctcgaggcctcctacttacagaccctgtggagcgtgggatgagggttattgagatctccatctacgaggaccggtgcagcagtggcagctccagcagcggcagcagcagcggcagtggcagcagcagcggtgggggtggtggggcgggggcccggtgactggccgagagtccctgtagggaggtgtatggccggagtgagggccttgcagacctgcggcggctgcgctaccagagcacccgcttctgagtcattctttgggctcaccctgctgcccggggtgggagggagggtgacgggcctcatatttcctgtgggccatcaacctatgccccctgtccctcacccccgtctggatcagtccatttcctgacctgggggcttttccttcccgatggggctggtctgggccacacagagacagatcttcctaggaaggctggggtggggagaacacaacctaggcggcccctctcttccacagcccctctcccaaccctgcgaggggggccgaggcctgccacatagaggactcccacactgcatgacccctcatcccaaacccatatccaccaggactctttcccttgggccctgcgtcccgtggctgtctcccagtatctgttccttctcatgcccctgcagggccccggcctgtctatgatcctgcctccaccaaattcaaggtgtggggagacgggtgccgtggttgggagctgttcagcgcactcctgacctcttctagacctatggctttcctgtcctgcattcagagctagaggccagctcggccttgcgagaagcatccaactttgagactttgcaggctgccaggtgctggttggggggcacagagcctggggctctgggaggtaatatgggggtctgggaaactccgtgaagagacatagccatgcggggcctgaatctcctgaactacagccagtttcctgagattagaacctgtgtgtatgcacatgtgaatgtatgtgtgagtgcacatgtgtgtaagtgcagtgtgcgtaaatgtgtgagtctgcgtgtgttagcatgcctgtatgtgagcgcgtgtgtgagcgcatgtgtgtgcaccagtgcacaagtgtatgaatgtggacacatttataagcacacctgtgtgtgtctgagtacatgtgcacacacgtgtgcacaaatgtgcatttatatgagtgtgagtgcatgcatgtgcatgaacatgtgtgcacaagcatgtgtgtatgagtgttcatgtgtatgagtgtgtgtgtatgcaggtgagtgcatgtgtgtgtgagtgtgtttgtgtgttccccttggctgccaggccaacgactgcttctctgcatcctgctgtcttcgctacctgagggtctgtgacttcttccctgtgtgggtccagcctgaccccctgtaagtaaatgtccaaaagccccttgcccctcccctagggctaccagggaacatactctactgcatatgttctagtggaagagaagccggggttctaggaaagaagagccaaactttggtggcctttggtgccccctctcagctccccatgacaagacaacggggctgcagacactgtgtgttcagcctgcccaggggctggggctctttaaggctttgtaggtgaggtttccatggaccttcaaaggtgccagcagcctgcaggggaaaggcaaactccctccttgcaaggaaaggagatgtccagccaatgatgcccggcttctgaggcccagaggagcaggtgggatgggagcagcccctggggctggtgtcccgaagatgaaatgaagggggctgcctatctcagttggcgggaggtgttagaagtggatgtgcaagaccagccactggaggtagctctctggagtcaaagagaggcctgcttttctaccagacatgggagcagcatgtaggatacaagggcctacccagagaccagagagagtcagcctagtccttgcagcctcaggaagtcctcggcccaagtgagtcctggtccaaggatccccctggagagccgcagttcagtgggctccaccgcagcccctggccacggcctatgccctccctgggcccctgtggggctgggcattgtgtctgacctgtgcatctcccatgggagggctgggcacaggcagtgctatggccttttttttttttttctttttccaataaaagaacttgcccagcgtgaagctctgtgatgctttctctgccccgtgacgatggagggtcagttctatgctccaggaccacatgaggggatactcagctgcctgaactggacctgacatggggagcaggatgaactctgtcttcttggagcttgcagtctactgaagaggcagacacctcagcatctctaatctggaatctttggggcacttgtagccttgggtgggggaacaggttggactgaaagcgaggccaaaagtaatcaattaatgatatcaataaatcctcatttcttga

SEQ ID NO: 283 - DNA, 2731 bp, Homo sapiens
actttctaaatcacagtgcctgtggccggatgacatggagggagctccctgaccataggaggggttagagacacgacgcccctctaccctcactcacagcagaggtggaaagctggagactgacccagtcgcagagcgcaccccactggggacccccagctcagccatgctggcctgtctgcagaggacccagaacgccccgggccaacacctggcctgcccgagcaagagcctggagctgcgcaagtgcgaggcggtggccagcgccatgcattcctcccgctacccgagcccagcagaactggacgcctatgccgagaaggtggccaacagcccgctgtccatcaagatcttccccaccaacatccgtgtgccccagcacaagcacctcagccgcacagtcaatggctatgacaccggtggccagcgctacagcccctacccacagcacaccgctggctaccagggccttctggccattgtcaaggccgcggtttcctcctccagcacggccgcaccagctgggcccgccaaaagtgtgctcaagagcgccgagggcaagcggaccaagctgtcaccggccgccgtgcaggtgggcattgcgccctacccagtgcccagcactctgggtcccttggcctaccccaagccacctgaggcgcctgctccaccacccggcctgcccgcagccgccactgccgcctccgtcatccccctgccgggccggggcctgcccctgccaccttccaacctgccctccatccacagcctcctgtaccagctcaaccagcagtgccaggccccgggcgccgcaccccctgcctgccagggcatggctattccccatcccagccctgccaagcacggcccagtgcccagcttccccagcatggcctactcggctgcagccggtctgcccgactgccggaaaggcactgagctgggccagggagccacccaagccttgacgttggctggggccgccaagcctgcagggtacgcagacagcggcctggattacctgctgtggccgcagaaaccgcccccaccgccgccccagccactgcgtgcctacagtgggagcacggtggccagcaagtcccctgaggcttgcgggggccgggcatacgagcgggccagcgggtcacccctcaactgtggcgtggggctgcccaccagcttcaccgtaggccagtactttgcggccccgtggaacagtgtgctggtgacacccaccagcgactactacaacccagcggcggcggtggtggtcacggagctggggccgggggcagcccgggagctggctgggccccctgcagatgccctctcgggcctgcccagcaagagtgtgtgcaacacatcggtgctgagcagcagcctgcagtcactggagtatctcatcaacgacatccggccgccctgcatcaaggagcagatgctgggcaagggctatgagacggtggccgtgccccggctactcgaccaccagcatgcccacatccgcctacccgtctacagataaggcctgccctgcggacatacggacatgcggacagggcgcagagccgggaggcaggccgcagaacagggtgggcggctcgcaggggcgctcagccccaccctgtgcctgctgatgcccacaggggagccaggctggctgccgcctcgctgtggccggatggagggtggcagggcaacctcacataccaaggcccctccccaccatcggttgccccaggacacagtgagggcctgggggcagccactgacgcccatgccttcctttatctaagctggcagaggcagggagagagaaaccactcaaaaacaggaatggttctttctgggcctcctgggacaggggcccaggccaaggtggggtgcaggaggaaacaggcgcaccagagtcagggtgggggcagggcagcccccccaggggtcaggcagctgtgtctccccacactggctccccagtattctggaaaaggggtacaggaggccgataggaagtcactgggcccaaagtgtctccccaccagccaggtgaagaccactctgatagaggctccagggactataccagtccccctgttcctccttcccctacccccaccattccttcctaacacagagttgcacccccatccccattctccaaaccctggactaccatattcccccttccctccaatacatcttatagggctgctgggtacagttgttcaggctgtgcactgcacaagggcaccttgtccaaggagacaccactttcacccaaacttgtatatttattacaattttctgcatcttgaggaaggggcgtcattttcctgttcgcacaaaggcaccacaggggctaacagtgggcctgcaatcttagatcccatccttgccttcttcgagggatctcttgggaccctcctggttttaactgggaggcccagaccaactcctttcctgcaaaccaccctccaaggcctgtcccacacgatcaaggcagggaaagataggcaggagtcccctcacgaagtcctcaagtcctggcccctctggcgctctggaagcggtactgtatctctctccaaggcctggtcaagcactaagtgcatttacaaatctctgagaatgttttttttatactaaaattgaccattatattctactgtgagaagtgcagtctgcactatattgttttaaaaacgaagagaaagaagaaaaaggaaaacac

SEQ ID NO: 284 - DNA, 2280 bp, Homo sapiens
gagggcgcttccggcacagcggaactccgggtgccggttgaggttgctggtggacctgctctggtggtcttggatgaggccccatgagcgcggcgcccctggtgggctacagcagcagcggctccgaggatgagtccgaggacgggatgcggaccaggccgggggatgggagccaccgtcgtggccagagcccccttcccaggcagagatttccagtacctgacagtgtgctgaacatgttcccgggcaccgaggaggggcctgaagatgacagcacaaaacacgggggacgggtgcgcaccttcccccacgagcgaggcaactgggccacccacgtctatgtaccatatgaagccaaggaggagttcctggatctgcttgatgtgttgctgccccatgcccagacatatgtcccccggctggtaaggatgaaggtgttccacctcagcctgtcccagagtgtggttctgcgccaccactggatcctccccttcgtgcaggctctgaaagcccgtatgacctccttccacagattcttctttactgccaaccaggtaaagatttacaccaatcaagagaaaaccaggacctttattgggcttgaggtcacttcagggcatgcccagttcctggacctggtttcagaggtggacagagtcatggaggaattcaacctcaccactttctaccaggatccttctttccacctcagcctggcctggtgtgtgggtgatgcacgtctccagctggaggggcagtgcctgcaggaactacaggcaatcgtggatgggtttgaagatgctgaggtgctgctgcgcgtgcacactgagcaagtccgctgcaagtctgggaacaagttcttctcgatgcctttgaagtgagcaccagaggccttcctcctccagggccctctgcagaccaggctgagatggaggaacctgctaaaatcgatggagatgcttctagcctcccagtaggaggccccagccatgccttcaacctggcaggaggtgtagccactcctcatcctccctgagtgctgatattctctctctctctttctcttcctcttctttctctctcttctcctctctttctctcctctgtctctcttcctctcctctcttcctctcttctctcttcctctcctctctctcttcctcttctctctcttcccctcctgtctctcctcccctcctctcttcctctcctctctcttcctctcctctctctacccctcctgtctctcctcccctcctctctcttcctctcctctctctcttcctctcctctctcttcccttcctgtctctcttcccctcctctctctcttcctgtcctctatctcttcccctcctctatctcttcctctcctctctctcttcctctcctctctctctcttgctttcttctctctctcctgtctcggctgttgtgggttgcaggttgggtgctgctgttgtggtccttcccagaaactgccagtagagggcagcctgggcatcctaatgcttactctggttgttacacaaagaaaatattggggtcactggcgagcccacccacactcaccagaatctccactgtagtccccctaacaaacagcccttcacttcctctcccacttcagcaatttgtattttgatgccattggcctcagatcagagtgttttaaatcatcacgccctggcttatccctggtcgagccaggacacggggtgcttcagtgggtctgtcaccctctctccttgaagcatgttgcttttatttatttacttttactctcaccctgctcctgtaccagcaggggccacttcaaagccaaggtacagggtgataacttgtggtccagcatcagttttctccacttctttctcccactcacccccagcaaggtgcctggggagacttgagcagatgtttcattttggcctggccagtggctgaaagccaggcctccaatgcactgtgacctctggcttccccagcagctttcccagagaggcagaggggccttccacagcccgggttctcctgctgcctcctgcctgctgcagctgcaggcattctgaggggcaacgtggaggaagggccagggatgcatgggattttaattgtttcatcacaccttccccgtggcaaagaaacagtcagtcctcttcaggtgtcttctggatttctggtgatggacagagaaatctttttacagtttcaaattatgttcaacaaataaaaattgcattttttattttggaaaaaaaaaaaaaaaaaaaaaaaaaaa

SEQ ID NO: 285 - DNA, 7165 bp, Homo sapiens
aacagggaagctgtggataccaacggagggtgggagcccgggaggctgcgggtagcccgggcgcccaggggcggcggcggcccagcccaggtgcccgcgcacaggggacctcggtgcggagccacccctcgagcgcgactgtcgcagcgccagcgcgcacggggccccacgcacccaccctccgcacctgccgcggggtccaaaagggatcctgcaaaaatgagccattctcaccccgctgggttacttgctgcatataatagccttatggataaacacctggctgggtattttaacaatacaaggataaggcgtcatctcttaagatcaggactgatcacaagaagtggaagaatactttctgaaaaagaatataaactaaatatgatgaagcgggatcatcaaaaatatatccgggaatgcttagcccaggcaatttttcataaagttcttgatatggagcgttaccatcagcttgaaataaaaaagaaattggagaccttagctaggaaggagcgaatccagaggtttaagggagagcacacaagaaggtctgttgaaaataacatgccaatcctgtctccccacccaccagttggcccaaagagtaatcgtggccatagtgttctggttgatgaaggacattccagtccgttagcactgacagcccctcgaccatatactgctccaggaaatatgcagcctccaattcgattacagcctcttcccagtaatcctgcagtagaaactgttccaaaggtaacttcaaggtccagatcaaaaacctcattgctggaaaatgaagctctgtttcccattgggggcaagaaggcagtgatgaagttcaggaactccataggcaattcacagagaatgaattcatatcaacttccaaacattaacagttacatgatgcctattcctcctccacttcccccaactgggaaaatcacaagagaaaatagatctgaaacatggagaaggagaagatttcgtccaaccactgctccaaatggcttagaacctcttttgacaaaggattcaagaaggattcataaaacatccttacatagtaatgcagctattacaatgatctatttggggaaaaatgtgcacctatcttctgataatcctgacttccgggatgaaattaaagtttatcagcagcactgtggtggggaaaacctttgtgtctacaaaggcaaactacttgaaaaagagacctttcagtttatttccaaaaggcatcatggtttccccttcagtctcacctttttcctgaatgggatgcaggtgaacaggttaagctcctgttgtgaatacaagcatcggaaaggttccaggcttggaggcaaacgaggctactttgggtttgtgtgtgttgagagatcatctccttgctacaagtgcattattgcaatgggccttgacaaaaaaccgtctttgccgaaatctaggaaagaaaagagcactgagaaaggagaggaactgaagaaggctgaggggaaagtgaggaaagagagagagtatgtgataccaaaaagaaatgagatcaaggagaacaaaacctctgtttcagccaaattttcagctcaagaaataaaaacagggctcaaagaagtggtaactgctgtggaggaaatgacaagtaaaggaaaaccaggacaagaagtcttggaagacgaccaggaaaatactttaaaatatgagtatgaagaagactttgaagtagatgaggagaaacaaggtgaaaaatctaatgaagaaggacaggctgatgttcaaatgaatggaataccgcagtcacctttggatgataaaaaagataatttagaccctgaaaaagagagtgaaacctcatcacagaaggcaccagatgcccgtgacaatgtgaaagatgagaatgatggatgctctgagagtgaactggaagaggataaacaagatatgaaaactgcttcatcaacctcatccagaagtcacccttattctagtgacagtgaggatgaatctgcagtgggggacagggaagcccacactgacagcagcacagatgaaagtgccagaaggtcatcttctcaggaactgagtgaaaatgataagccaagaaagtctcaccttccaattgaggaatccttagaaattgaaattgaagaccaagaaataacaaaagcagatgtggagaccaagccgatgccaatagacgaaagctttgagaatgttcttaaagaaggaacggagaaaggaacccaagagattgcagagggtttatctgagaagtccgggaaacatgtttctgcagaagaaaaggaaaaggataagagtaagctttgggaagaaagcactgctcaggtgaaggacaaaaaggcaggtctccctgggttggaggaaggtggaaaggattcattgccattagcctatgtcctggctcttggtgcaccaacaatgaatttcatggtggatgaaacagcagcaatcaactcaaacaaggaatcccagcaattggtgcaaaaaacgtatacactggagaagaaagaagcaatggaggaagatgaagcgccccagcacagagatgctgacatagtacagggaaaaggggaggcagcactgtggggagaagcaggagctgttcatgaggctcccttgagggcgtggaagccaacagcagagcagccagaattggcagaagagtttacagaaaaaagggagatccctccaggcatagaaaggggggcagagggagcagcagaagcagaaggggtcagaaggctgggtgaaggggggtcagaccccataggacaagcagcagcaaaagatgctgtgggtctgagtaaagatgaggctcctgaaaagcaagccttgatgctcacagtgcttgagacagacaaagcagcttctgaaggggaacagggtttagagaaggcagtgcttgcaaatgaagcagcagccctgaacttggagcatcttcatgaagtagcagccctgagagaggcagcgacatcggaggagggagaggctgagggtggggtggctgtgagtgatgtcggagaaagtgaagaggaagcatccatagacctagaggacacaggacccatggaggacacagcatcaaagagagaggacggttctgaagaggcaattcttgggggagaggaaccagccaaagagagaaaagaggttatgagaacagaaacacgcttgagccccttcacaggagaggcagaggcaagccggatgcaggtttcggagggcagccctgaggaaggaagccttgcaaaggaagccttcctttgcaaggaagatgtggaaggggaagagatggtgactgaggcagaagctaatagggaagatgataggaaagaaattttacccaaggaattagatttagcaagagagcgaaggaaagctgagaggccaaaaacatctctgaggaaaactgactctgagagagaagaggtgacaagggcaaatgcactcaaggatgaagatgcttttaaagaagagcaaaaacttaaagcggaagaaggggaaacagagacagaagtaagagctgaggaagagacaaaagctcccccaaatgaaatgggatctgatgctgagaacgaagcacctgtggaggcttctgagttgtctgacaatccagggcttctaggagaagattcactaaaagagacagtggttcccatatttgaagcaacgcctggatttgaaaagtcgctggaaaacataacagctctgaggaaagaaggaggaggggaaagactgagtgaagccagagacacagagcacaaagacagagaagagctgtccagcagggagaatagggccctgaaggaagggcaccgccaagatggagagggggccttagcagctcctgaagctgagccagcaggaaaggtgcaggcccctgaggggctgatcccagccacaggccaggcagaggagctagcagccaaagatcacgactcctgcgcaggactggaggggagagctgaagggcaaggaggagtggatgtcgtgctaaggacccaggaagctgttgctgaggaagatcccataatggcagaaaagttcagggaggaagcggtggatgaggacccagaggaggaagaggacaaagagtgcactctggagacagaagcgatgcaggacaggaactcggaaggggacggggacatggaaggagaaggaaacacacaaaagaatgagggcatgggaggaggaagggttgtggctgtggaagttctacacggaggtggtgaaacggcagaaacagccgcagaggagagggaggtgttggcaggttcggagacagccgaggagaaaacaatagcaaataaagcctcctccttttcagatgttgctgaggaagaaacctggcaccaacaggatgagttagtaggaaaaacagcagctgcagggaaggtggtggtagaggaattagcacggagtggggaggaagtgccagcagcagaggagatgacagtgacatatacaacagaggctggggtgggcactccaggagccctggagcggaagacctcagggctaggacaggagcaagaggaagggtcagagggccaggaggcagccactgggagtggcgatgggaggcaggagacaggagcagctgaaaaattccgattaggattatcacgggagggagagagggaattgagtccggagagtctacaggcgatggcaacacttccagtgaagcctgatttcactgaaacccgagagaagcaacagcatatggtgcaaggagaaagcgagactgcagatgtttcccccaacaacatgcaggtctaggagacttgctggcagacggataatttaaagatgtcttctgaagatgtaaagagtggagaaagattcacgcaagcatctcaccaggattcttgattttctctctctcctctttagttgctggttgcgcttgtctgagatgattcccaatctgtcagccctggtcagtagctcagtaagcaccttgagaatagctcaagtagatctgtaggacccttcttagaagcagtggttcctcatggagaaacttgtgaggctgttacacattctacacacctaacattattttcaaacaaaaatgataattttcagatgcttgacttttaccaaagatcactggaaggcccagtcctaatgttaggggtttgtttaaagtcctttttattttacaatacagagccccagtcaattccacaatctcaatttcatacatgggaattttatttaaaaatctgtggtttggggctttaatgaattggcctgtgaaaatgagctctaaatttcctcccacgtacactcaaaactcaagattgctccaaatctctaagttcttccagcaaaagatttcttggcatgtatattcacttatacttagaaatattcattcttttaatttatgccagaataacaaagtggaaatcttatttcaaaatgctctttgtttttttgtgtgtgtttctgtagttctgctttctggggtagactagtaaaatggtagcttccagcattttgtccctggggccttctttatagggccactcaaatttaaataaaagtagtaaataatttagctaagtggaataagtataataattatagtggtaagcatagcacatcagcattatgccaacattctagactctttagttgatgtcattaaatggaaaagaaacttggattaaatgagtgtgctgctcaccttcccaagttctgttatttcaaacctgtgaactaaccttgcagttcattataaatcaacagtaacaactgcattctaaattactccctgatattattttctagttgtgtatcagcctgtctcctaggggttttcatttccctgaagacatacaagtgccccagagcgcatgtatatgtctaccatttctctatatgagaaggtaaaaaaaatttccttaagcagtgattttccagccagaatatacattagattttcatgggacgcttttataaatgactcaacccttttccccaccccagagattcagacttaattcgttttagatggatctacacatcagtatatatatatttttaacttttcacttgattcttctctgtagccaaggttgagaaccgctgttctaaatcatcatataatccatgctggccacattacactcaaggtccctagggaccaggcatattatcatagtaggtattttccattttaatgtgtaatggagccattcaatgatcaaaaatacactggaccagatagtagactggtcccttgatcagaagcatcagcacatcagcatcacctggaaattgttcccagcctttgtctcctacctactaaattagaaactcttggtgggttccagtaatccatagcttaacaagccctgcagttaatactgatgtacactgatgtccaaaaactgctgtcatggactattgattgtattgaggattagtctcagttggaaagccaactacagaggcattttgaactttctttctttgcctctctatgtctctctgtcttttcctgtcttctgatttatctgtctttctttctctagtaaatggcactcaatataaaagtggtggagtcaatcttaaacttatttttattatgattgtattgatacatgcacgaagtccctctgccctactccctattcaaggatattactcactgcacatcataaatctccatcatctgtcttaaagttttatgagtagatttcatctacattatattcaagttcatttattactgagctgtattactgtggagctctaacagtatttgtttcctgatttcaaactcaatgctacagagcactttgaatacatcacaccttataggaaagatagtaaatgtattaatcccattgaaaaattagttttgtacaatgtgctaaatagtattgcattggattacttttatatttaacacactccatcaaaacatcccataacataattttacaatctgcatgtgaatttaactgtgaaattcagtattgtgatattttgaataagtgaattctttctctgcaaatactatgttgataaaattacttgtatgttcccctgaaatggtttgtttcctgtttcttcattattaaaacataaatcaatcatatgtttacagataaaaaaa

SEQ ID NO: 286 - DNA, 3347 bp, Homo sapiens
atgtttgttctcttcttgtgcaacctttccttggtaccagcggccgcttcaaagaataaagttaaaggcagccaagggcagtttccactaacacagaatgtaaccgttgttgaaggtggaactgcaattttgacctgcagggttgatcaaaatgataacacctccctccagtggtcaaatccagctcaacagactctgtactttgacgacaagaaagctttaagggacaataggatcgagctggttcgcgcttcctggcatgaattgagtattagtgtcagtgatgtgtctctctctgatgaaggacagtacacctgttctttatttacaatgcctgtcaaaacttccaaggcatatctcaccgttctgggtgttcctgaaaagcctcagattagtggattctcatcaccagttatggagggtgacttgatgcagctgacttgcaaaacatctggtagtaaacctgcagctgatataagatggttcaaaaatgacaaagagattaaagatgtaaaatatttaaaagaagaggatgcaaatcgcaagacattcactgtcagcagcacactggacttccgagtggaccggagtgatgatggagtggcggtcatctgcagagtagatcacgaatccctcaatgccacccctcaggtagccatgcaggtgctagaaatacactatacaccatcagttaagattataccatcgactccttttccacaagaaggacagcctttaattttgacttgtgaatccaaaggaaaaccactgccagaacctgttttgtggacaaaggatggcggagaattaccagatcctgaccgaatggttgtgagtggtagggagctaaacattcttttcctgaacaaaacggataatggtacatatcgatgtgaagccacaaacaccattggccaaagcagtgcggaatatgttctcattgtgcatgatgttcccaacactttgcttcccactactatcatcccctcccttaccactgcaacagtcacaaccactgtagccataacaaccagcccaaccacatctgcaacaaccagcagcatcagagatcctaatgctttggctggccagaatggccctgaccatgctctcataggaggaatagtggctgtagttgtatttgtcacgctgtgttctatctttctgcttggtcgatatctggcaaggcataaaggaacgtatttaacaaatgaagctaaaggagctgaagatgcaccagatgctgatacagccattatcaatgctgaaggcagccaagtcaatgctgaagagaaaaaagagtatttcatttaagatgcaggccaagattctgagttttactaccaggctgaatgctggagaaaactggctatcatctttcagaagtcatttctaccatcgtctgctacccttattaactcccatactgtactgctatcagtagccagtgtataccaacaatcagctgttgaaagcatcattctttaattactgtaccatccataatgcaggacatttcttactgcctaaatttcacaccattgctcttttaacatacagtgcttgaatatacagccttaacaatgttaatcatctccttggatcattatattgagtggtttttatacattaaaaaatgtatgcagagtttttttcccccattttttcccctttaagtcatagaccttatcagtttgccattggacagctttcacaagtaacaggattagggaaggacataatgtatttaagaataagtgaaggttagaggtttacaattaatgttttctacatgtctgtcttcaaagacaacatgctttggaaacatatgtcctagaaaacataaaattaaaaaaaaacactatagtgtagtttttggaatgttggagattatactggtaaagctgtatcgatttgctattgaaatatagtatttgatacaggagccatgtgtacgaattgcaatcatgacatggtattttctataattatagagatcttactattaggatattgtagcttcatttaccaataaattattccaaatgatttactgcttttggaatcacaaatatttaattcatttctctaatttgattctataatttatttgcttcataaagattcacctgcctaaacaatattgaagtatccatagggcacaattttcagacattttagtatctgtatatagtgcatataataaatccaattaaacattatttgatacatatttaacttttttggctgtatgtaattcagtcataagtaagcattttctaacgtccattatatccctttaggtattacttaaaccaatattataagtagataacatgtattagtatttttgtctgtatgtcctagcactgttcaacaacaaatttttctagttcttgttaatttttatttgttatacaatggaagcacaatgttataaggaaaggtaattttaagctaacaaccagtgcacagcctcaggttttaaattacaaccacagttgaataataacctaaaaataaattttagtttgctaaaaatttacaaattttcattttgcagttccagagctgcttacctatgttggtttgccaaaaagaagtgtttaagatatgttttctgtataaatgaactaattctttatattaaattcctgtctatgcattttgtgaggtacaaactgatgaaacagtgagtgatagagaatttctgccatgcttttaactccaaagtgaaagtctctttctctggattattttaaaattttggcgtgtttaaccattaagaaatgctgtattcttaaatatgaaacagttaatctaaagtcttattatttcttctagtaaaataaaatattgttagattagttctcattaaatttattatatgctaaagaataaaactccagttagatttaaaaaaatcccatttacaagcattgcacctttaagaagaaaacaaatatgacagtatggtagctatacttgtgatgtctgacgcatgatggcctatggttttaaaaatagtattgtggaatatatttttgggtaataagaatggttgagtgcaacatcatgtattaatatcaaatgaaagacaagggtgctgtatctttgattatttatcaaaaaagtataaatcttttaaggaaaatgttagaattttaaagtttttttttgattgttgaagcatttatcttgttgatttcttacaaaagaaaaaggacgatgtcagtcaagcagcactttttcagaatatacagaacataaataatatgatgtggttgagtgttaacataataaatcatatacagtatgacattttaaggaaaaaaaaaaaaaaaaaa

SEQ ID NO: 287 - DNA, 5482 bp, Homo sapiens
ggctgcatcgacagcttgcaacactcggcatcttttctggaggcgcctccttcagcagccgcagatggcatccggctgcgggctcggggctcgcaattgattctcccccttgcccacctcgagtccacggacgcacctctcccttcccctcctcccttcgcgcttctgggtctgagcccagctcgcgaccgccgggcagaggatcagtcgcggcggccgaggctgagcagcagcgctctcgctccctgacctggggagaagcgcccacccgggagagctgatccccggctgcctccagcgccccccaccttttgcactccaagccgggggctccagagaccccgctccccaggcgccactatgctggacccttcgtccagcgaagaagaatcggatgagatcgtggaggaggagagcggcaaggaggtgctcggctcggccccgtccggcgcgcgcctgtctcccagccgtaccagcgagggctcggccggcagcgccgggctggggggcggcggcgccggcgccggagccggggtgggtgcaggcggcggcgggggcagcggcgcgagcagcggcggcggggccggggggctgcaacccagcagccgcgctggcggcggccggccctccagccccagcccgtcggtggtgagcgagaaggagaaggaagagttggagcggctgcagaaagaggaggaggagaggaagaagaggctgcagctgtatgtgttcgtgatgcgctgcatcgcctacccctttaatgccaagcagcccaccgacatggctcgccggcagcagaagatcagcaaacagcagctgcagacagtcaaggaccggtttcaggctttcctcaatggggaaacccagatcatggctgacgaagccttcatgaacgctgtgcagagttactatgaggtgttcctgaagagcgaccgtgtggcccgcatggttcagagtggaggctgttccgccaacgactcccgggaggtcttcaagaagcacattgagaagagagtgcgcagcctgcctgagattgacggcctcagcaaggagactgtgctgagctcctggatggccaaatttgatgccatctaccgtggagaagaggacccgcggaagcagcaggcccggatgacagccagcgcagcctccgagctgattctgagcaaggagcaactctatgagatgttccagaacattcttgggatcaagaagttcgaacatcagctcctttacaatgcctgccagctggacaatccagatgagcaagcagcccagatcagacgagagctggatggacgtctacaaatggcagaccaaatagccagggaacgcaaatttcccaagtttgtatccaaagaaatggaaaacatgtacattgaggagctgaagtcatctgtcaacctgctcatggccaacttggagagcatgccggtatccaaaggcggggagttcaagctccagaaactcaaacgcagccacaatgcttccatcatcgacatgggcgaggagagtgagaaccagctctccaagtcagatgtcgtgctgtctttctcattggaggtggtaattatggaagtccaaggcctcaaatctttggctccaaatcgcatcgtatattgcacaatggaggtggaaggaggagagaaactacagactgatcaggccgaggcttctaaaccaacctggggcacccagggtgacttctccacaacccatgcactgccagctgtgaaggtgaagctgttcacagagagcacaggcgtcctggcgttggaggacaaggagcttgggcgggttattctccatcccaccccgaacagccccaaacagtcagagtggcacaaaatgacagtctccaaaaactgccccgaccaagatctcaaaatcaaacttgctgtccgaatggataagcctcaaaacatgaagcattctgggtatttatgggccatcggtaagaatgtctggaagagatggaagaaaaggttttttgtattggtgcaggtcagtcagtacacgtttgccatgtgcagttatcgggagaagaaagcggagcctcaggaacttctacaattggatggctacactgtggattacaccgacccccagccaggtttggagggtggccgagccttcttcaatgctgtcaaggagggagacaccgtgatatttgccagtgacgatgaacaagaccgcatcctgtgggtccaggccatgtatcgggccacggggcagtcacacaagcctgtgcccccgacccaagtccagaaactcaacgccaagggaggaaatgtacctcagctggatgcccctatctctcaattttacgcagatagagctcaaaaacatggcatggatgaatttatctcttccaacccctgtaactttgaccacgcttccctctttgagatggtacaacgccttactttggatcacagacttaatgattcctattcttgcctgggctggttcagtcctggccaggtgtttgtactagacgagtattgcgcccgaaatggagtccgggggtgtcaccgacatctctgctacctcagagacttgcttgaacgggcagaaaatggcgccatgatcgaccccacccttcttcactacagctttgccttctgtgcatcccatgtccatgggaacaggcctgatggaattggaactgtgactgttgaagaaaaggaacgttttgaagaaatcaaagagaggctccgagttctgctagaaaatcagattacacattttaggtattgctttccatttggtcgacctgaaggtgctttgaaagctactctctcactcttggaaagggttttgatgaaagatattgttaccccagtgccacaagaggaggtaaaaacagttatccgtaaatgtctggaacaggctgcgttagtcaactattctcggctctcagagtatgccaaaatcgaagagaatcaaaaggatgcagaaaatgtaggccggttaatcactcctgccaaaaagcttgaagatacaatacgtcttgctgaactagtcattgaagttcttcagcaaaatgaggagcaccacgcagagccacatgttgataaaggagaagcctttgcgtggtggtcagatttaatggtggagcatgcggagacgttcctgtcactctttgcagtagacatggatgcagccttagaggtgcaacctccagacacatgggacagttttccactatttcagctgctgaatgattttctccgtactgactataatttgtgcaatggaaaatttcacaaacacctgcaagacctgtttgccccacttgttgttagatatgtggatctgatggagtcctcaattgcacaatccattcacaggggctttgagcgggagtcatgggaaccagtcaagagtttaaccagtaacctacccaatgtgaacctacccaatgtgaaccttcccaaagtaccaaatctaccagttaacatccctctaggcatcccacaaatgcctactttttcggcaccgtcatggatggctgctatatatgatgcggataatgggtcaggcacctcagaagatctgttttggaaacttgacgcccttcagaccttcattcgggacctgcactggcctgaagaagagtttggaaagcacctggaacaacggctgaagttgatggcaagtgacatgatcgaatcttgtgtcaaaagaaccaggattgcatttgaagttaagctgcaaaaaaccagtcgatcaacagattttcgagtcccacagtcaatatgcaccatgtttaatgttatggttgatgccaaagctcaatcaacaaaactttgcagcatggaaatgggccaagagcatcaataccattcaaaaatagacgaactaattgaagaaactgttaaagaaatgataacactcttggttgcaaagttcgttactatcttggaaggagtgctggcaaaattatccagatatgacgaagggactttgttttcttcttttctgtcatttaccgtgaaggcagcttccaaatatgtggatgtacctaaacccgggatggacgtggccgacgcctacgtgactttcgtccgccattctcaggatgtcctgcgtgataaggtcaatgaggagatgtacatagaaaggttatttgatcaatggtacaacagctccatgaacgtgatctgcacctggttgacggaccggatggacttacagcttcatatttatcagttgaaaacactaattaggatggtaaagaaaacctacagagatttccgattgcaaggggtcctggactccaccttaaacagcaagacctatgaaacgatccggaaccgtctcactgtggaggaagccacagcatcagtgagtgaaggtgggggactgcagggcatcagcatgaaggacagcgatgaggaagacgaagaagacgattagaccatttggtcctagagtctgctgggacagagtcctgtaatcagtgcatgtccttagtctgttagttaaacccattaggaattttctgtcaactaccatgcccatgagatgtttatcaatacaactgccattttagctatgtggtaccaagattagcaaatgaccttcatatccactgatttcctgatgtccatgtctatatgtttacaagcaatatggagcaccattctttaaatactgttcatggagaatacatagtctaaccactaggcgtgtccctgttatcagcaaagatcaatgatgcttcattcatgtactatgtatgcattggtggtaaatggatgtgagggcaagtacatcaagtacattcactctgtttcacgtatgtggatgccagttaattaaatgagtacgtaaataaattaattaaaacacatagatctgctttgtgtttttatttttattttttgaaaaacaaaaggcaagtctccaacaattaacttttgatgctttctgttcccctaaaaccaaaaaatgaaccccttgtgtcgttgttaacccatcctttcatttactcatataattagccaaaaaaaaaaggatggctacataccaatggattgattctcttaattgccacggcaagggggcgatcctatcatgacttaacatcaagcgcgcagttcaaaactactgtcttctgtcaaagttttctcctcttaaatgttattttgcttttacgtctcaactgtgtatgtaaaaaaaatgaatatttaaattacaaccctagactaaaaatgtgtttataataagatgtggatatttccttcagtagattgtaaccataatttaaattattttgttccacactgttttttatatctgtcatgtacattgcattttgatctgtaactgcacaaccctggggtttgctgcagagctatttctttccatgtaaagtagtggatccatcttgcttttgccttatataaagcctacagttatggaagtgtggaaaactgtggcttctcaataaatattcagatgtcctaagaatata

SEQ ID NO: 288 - DNA, 4201 bp, Homo sapiens
ggcagtggtgctgggagtgtcgtggacgccgtgccgttactcgtagtcaggcggcggcgcaggcggcggcggcggcatagcgcacagcgcgccttagcagcagcagcagcagcagcggcatcggaggtacccccgccgtcgcagcccccgcgctggtgcagccaccctcgctccctctgctcttcctcccttcgctcgcaccatggctgatcagctgaccgaagaacagattgctgaattcaaggaagccttctccctatttgataaagatggcgatggcaccatcacaacaaaggaacttggaactgtcatgaggtcactgggtcagaacccaacagaagctgaattgcaggatatgatcaatgaagtggatgctgatggtaatggcaccattgacttccccgaatttttgactatgatggctagaaaaatgaaagatacagatagtgaagaagaaatccgtgaggcattccgagtctttgacaaggatggcaatggttatatcagtgcagcagaactacgtcacgtcatgacaaacttaggagaaaaactaacagatgaagaagtagatgaaatgatcagagaagcagatattgatggagacggacaagtcaactatgaagaattcgtacagatgatgactgcaaaatgaagacctactttcaactcctttttcccccctctagaagaatcaaattgaatcttttacttacctcttgcaaaaaaaagaaaaaagaaaaaagttcatttattcattctgtttctatatagcaaaactgaatgtcaaaagtaccttctgtccacacacacaaaatctgcatgtattggttggtggtcctgtcccctaaagatcaagctacacatcagttttacaatataaatacttgtactaccttaatgataaggactccttaaagttccatttgctaatgattaatacactgtttgggctggccagtttttcatgcatgcagcttgacgattgagcacagtcaggcctttgtattaaaaatgaaaaatgaaaaaacaaattcaaaacctattcaaatgggttctagttcaatttgtttagtataaattgtcatagctggtttactgaaaacaaacacatttaaaattggtttacctcaggatgacgtgcagaaaaatgggtgaaggataaaccgttgagacgtggccccactggtaggatggtcctcttgtacttcgtgtgctccgacccatggtgacgatgacacaccctggtggcatgcccgtgtatgttggtttagcgttgtctgcattgttctagagtgaaacaggtgtcaggctgtcactgttcacacaaatttttaataagaaacatttaccaagggagcatctttggactctctgtttttaaaaccttctgaaccatgacttggagccggcagagtaggctgtggctgtggacttcagcacaaccatcaacattgctgttcaaagaaattacagtttacgtccattccaagttgtaaatgctagtctttttttttttttttccaataaaaagaccattaacttaaagtggtgttaaatgctttgtaaagctgagatctaaatggggacaaggcaggtggaggggaggccagtgtacatgtaaatgcccacagcccagcattgggtttccctcccaaggccccagcaccaacctctgagcccaagaccttgcctgaaaacaagcagataccgattgcttcatcctatttatggacatgtaggtctagttgcattttcactggggggaggggggaaggtgaattatggtaacttttaatgatctattcaggcagtagagctcttaaggaaaaaaaaaaacccactttctctcaagcatgtatttaggggttgttctcaattgtgctgctgattacctgtcttatgtaactacttgagaccatctgcaagagacatgatttagtgtgtctgtaattcaatcttcgctgtgtgtggtagaagcagtagtcacttttgtaagccagtctcttcatgcctaaaagacactaccagtcacctttgattcgcgacttttaatttatgattatacttagcctcctcctcctttttttttttttcccaagttgacttgactttgcttttttccccccaagtagaactaatgctagcttccagcttgaaagtaaaactccagtgtggagtgaattttgtgtctaattataaacctgtaaccaaaactcagacatctggtactggtctttgcattgagattggtccctgtaaaaccccctttaaaagcatattgcatttagtacagagctcttttttgaaatgaaggctggagatgtgcatttttcacggtgttaactggttgtatcttattagcaaggagattggggttttgagtgtttgcgtgggtggtttcaatttgccagggaacagtggcaggctgctagcaaggcagtgagaagctcttggcagccaaatgggtgcattcagggctgatttatagagacccttggcttctccttctcctactccctgtctttctggcattttgtagcttgttagattttctgccagaggggtgggtcagagcagtggaggggagacatcgcccatgtgcttctgctactggtccttgggctgggtggttggtagaggagatgttgacactatgagctaagggttggcttttgtaattacctgaatctgaaaggaatgcctaaggttaccttggggtttctcttctggtgagatagggttcctggtttgagtaagttaatgtcctggatatttcttgtggcagggggtggtcaaagagcctgattgctgacccagtctcaggcctgtggtcgatgacctctcggtagtttcaaagggggctggagggggatatttgacttgttttttcgaaatgtagccttctaaccctcaagtctttagaagctgggtggactcttagtggtcctgcagcgtatcctaaaagactacctttgaaacaggattcttgtatggccaggatcctgtctgggaaccagaaaccctacaccctccccctccagggaatgctgagttccagttttgagcagaggtgaggcagaatccactgtagccttccgccctggtatttggggggatgaccagcccaggcgttgggtgttagtctgcatgagtttgtgagaggaaatagctgggtgtcctggcagtgcccttgaagttggttaggaccttcctgtaaactcttgcccctacttctaactactctataaatatatacatatatttatatataaagtgattagttgaactggcatcctgctttagcctgagacttgccataagaaactgctgagtacttggcaaaccctttcatagttttgttctccatctgtttggggtaggtgttgagcgaggcaaatggatctcgatatttcagatgggcttttgatgcactgttgccaaggaaggctttttctgattttttgacaaatgaatttttgcacactttcattggtgtctttcggcaacttacacacattgaaaatgagctattgtacatatttttatattctctttataaatgcatgtctgattgtacttgtaacaatattgtaatgaacggctgtgcagtaggcccagcgctgctgtgtctcgtcagaggaatagcttaccacgaacccctcagcatactgggaatctcttcctgaacaacgaatgtaaatttggtcaagtctactcttccgttcattcaattattttaagcatttgaattatttattgtatatcctaaatatatttctcctttggcagtgactagatttccactaatgtgtcttaatctatccctccagctggcagttactgtttttttaatcccctgaagttgtcctgtaggagacagaaattctttgctgtctgtatcccttggagtaagaaggtagtggcatgggtggagtgtgtgttctttctccaaatctattatgatgtttattaaacacttctgtagcaaagatggtggtagttcttttgttactgaagttgcccttcaccatggctatttgaaaaggagatgtacttggacgtttctgtaaatcttgagataaactgtttggagatttaaccacctctctgatgggggaccaactctatggaaattgtaaatacgttttatttataaacctggcactgtattcaataaacatttctgcagcctttcatctct

SEQ ID NO: 289 - DNA, 908 bp, Homo sapiens
ggttgacccgggccctcctccacacccccttccttcttcgcctcctccctctttcctgcacgggggctcgggctcactataaaaggtgggagcgcgtggtgccccagcaacgacgagtttcagaacgatggagagctcccgcgtgaggctgctgcccctcctgggcgccgccctgctgctgatgctacctctgttgggtacccgtgcccaggaggacgccgagctccagccccgagccctggacatctactctgccgtggatgatgcctcccacgagaaggagctgatcgaagcgctgcaagaagtcttgaagaagctcaagagtaaacgtgttcccatctatgagaagaagtatggccaagtccccatgtgtgacgccggtgagcagtgtgcagtgaggaaaggggcaaggatcgggaagctgtgtgactgtccccgaggaacctcctgcaattccttcctcctgaagtgcttatgaaggggcgtccattctcctccatacatccccatccctctactttccccagaggaccacaccttcctccctggagtttggcttaagcaacagataaagtttttattttcctctgaagggaaagggctcttttcctgctgtttcaaaaataaaagaacacattagatgttactgtgtgaagaataatgccttgtatggtgttgatacgtgtgtgaagtattcttattttatttgtctgacaaactcttgtgtacctttgtgtaaagaagggaagctttgtttgaaaattgtatttttgtatgtggcatggcagaatgaaaattagatctagctaatctcggtagatgtcattacaacctggaaaataaatcaccctaagtgacacaaattgaagcatgtacaaattatacataataaagtgtttttaataatt

SEQ ID NO: 290 - DNA, 1298 bp, Homo sapiens
agctggagccgcggcgcgctgagcgagcaggcggggcgggagcgcccacagctcggagccaccaggcgctgacgaggagcccggctgagggaggatgcgccgctgacgcctgcgggagccgcgcgcctggggcgggaggatgctccagaggggcctctggccgtggcgcacgcggctgctgccgacccctggcacctggcgcccagcgcgcccgtggccgctgccgcctccgccccaggttttgcgtgtgaagctgtgtggaaatgtgaaatactaccagtcacaccattatagtaccgtggtgccacctgatgaaataacagttatttatagacatggccttcccttggtaacacttaccttgccatctagaaaagaacgttgtcaattcgtagtcaaaccaatgttgtcaacagttggttcattccttcaggacctacaaaatgaagataagggtatcaaaactgcagccatcttcacagcagatggcaacatgatttcagcttctaccttgatggatattttgctaatgaatgattttaaacttgtcattaataaaatagcatatgatgtgcagtgtccaaagagagaaaaaccaagtaatgagcacactgctgagatggaacacatgaaatctttggttcacagactatttacaatcttgcatttagaagagtctcagaaaaagagagagcaccatttactggagaaaattgaccacctgaaggaacagctgcagccccttgaacaggtgaaagctggaatagaagctcattcggaagccaaaaccagtggactcctgtgggctggattggcactgctgtccattcagggtggggcactggcctggctcacgtggtgggtgtactcctgggatatcatggagccagttacatacttcatcacatttgcaaattctatggtcttttttgcatactttatagtcactcgacaggattatacttactcagctgttaagagtaggcaatttcttcagttcttccacaagaaatcaaagcaacagcactttgatgtgcagcaatacaacaagttaaaagaagaccttgctaaggctaaagaatccctgaaacaggcgcgtcattctctctgtttgcaaatgcaagtagaagaactcaatgaaaagaattaatcttacagttttaaatgtcgtcagattttccattatgtattgattttgcaacttaggatgtttttgagtcccatggttcattttgattgtttaatctttgttattaaattcttgtaaaacagaaaaaaaaaaaaaaaaaaaaaaaaaa

SEQ ID NO: 291 - DNA, 3081 bp, Homo sapiens
gctgcgggctccgcgcgcgcgggccatgtccgctttctgcctgggcttggtcggccgcgcttcagcacccgccgagccggacagcgcctgctgcatggagctgcccgccgcggccggggacgcagtccggagtcccgccgccgccgccgccctcatcttccccgggggctccggggagctagaactggcgttagaggaggagctggcgctgctggcggccggggagcggccgtccgaccccggggaacaccctcaggccgagcctgggtctctggccgagggggccggaccgcagccgccgccctcccaggaccccgagctgctgtcggtgatccgacagaaggagaaggatctggtgttggcggcccggctgggtaaggcgctgctcgagaggaaccaggacatgagccggcagtacgagcagatgcataaggagctgacagacaagctcgagcacttagagcaagagaaacatgaattgagaagacgatttgagaaccgagaaggggagtgggaaggccgagtgtcagagctggagagtgatgtgaagcagctacaggatgagttggagaggcagcagattcatctgcgggaagcagatcgagaaaaatcacgggctgtccaggaactgtcggaacagaaccaaaggctattggatcagctcagcagggcatcagaagttgagagacaactctccatgcaggtccacgccctcagagaagactttcgggagaaaaactcatcaaccaaccagcacattatccggctggagagccttcaggccgagatcaagatgctgtcagatcggaaacgggagctggagcatcgtctcagcgctactttagaggaaaatgacctgctccaagggaccgtggaggagctacaggaccgggtgctaatcctggagaggcagggccatgacaaggacctacagctgcaccaaagccagctggagcttcaggaggtgcgtctctcctgccgacagctgcaggtgaaggtggaagaactcactgaggagaggagtctgcagagctctgccgccaccagcacatccctcctgtcagagatcgagcagagcatggaggctgaggagctggagcaggagcgagagcagctgagactgcagctctgggaagcctactgccaggttcgctatctgtgctcacaccttcgaggcaatgacagtgctgactcagccgtctccacggactcctccatggacgagtcttcagaaacctcgtccgccaaggatgtgccagccggcagcttgcgcactgccctcaatgagctcaagagactgatacagagcattgtggatggcatggagcccacggtgacactgctgagtgtggagatgactgccctaaaagaggagagagaccgactcagagtcacttctgaggacaaggagccaaaggagcagcttcagaaggccatcagggaccgcgacgaggccattgcaaagaagaatgctgtggagctggaacttgccaagtgcaggatggatatgatgtctctgaacagccagttgctggatgccattcagcagaaactgaacctctcgcagcagctggaagcttggcaggatgacatgcacagggtcattgaccggcagctgatggacacgcacctgaaagaacggagccagccggctgctgccctctgcaggggccacagcgctgggcggggggatgagcccagcatcgctgaaggcaaacgactcttctcattcttcaggaaaatttaagttgggaggagtcaggccaccaaagatgggtggactggaggcagctggaaaggcggtgcaggcaaggcctcccctgcagcttgcacctcagcagctgccctgcccctcatgctagggccccatgggtccgggagggcctgctccctttcgtcggtggggatggagacctagaggtgggggcctgccttggccactgaaggcttcccttggcccaccgcctggccaagcccacgcctgggcttctccaggaccacgtgcttgagcagggttaggccacctcccagaggggccccttggtgttgggctttgcagctcacacccaacagatcgcagcccacccccaggcactgctgcctccttgattttagcaaatggggaacagaaggaatggaggcccttctctgcatgcctcaggaggcctgagccccaggggcctagacctgtgggggcagcgggccaggcctgagcctccattccttccccagcccctggcccagggtcaaaggagagatggcagcccctcccccgcatgcatgcacctcagctggcaggaggccaagcctctggccgcagggtctaagagccggggcttacccaagctcagctgaggccacccgagccccagggaggaagaaggccctgtccccctgtcgccactgctctccctcccagccttcagtctctgccccttagcagggcctggccaggcagagtgttatcaccagtcatctgcaggctttagccatccagccctttcccctgctcagggctggggttggacggggtctcctcctcccacagctccctcctccacccctcacatacatacataatttcttggcctagccaaacaagtccaggccactgaatggcaccagaggggtctgtggtcagccaccccaccttgagggcagcacaggcaccacggggtggaggggagggggaggctgccggaagcctccagatgctgcctgcctgcctgcagaagcctgcagtggctgctgctcctgcctctgcagccgcccctcctcctccacccaggccccaactcagaggctccgcggcccggccagccctcagctgctcacaaccgattcagtctccctccctccctcacgtggggaaagcacagcagggatgcgcggcaagaatgtacctgtagatgtgtacataccacagtgctgtaattttgtatgtagcaatcatgtaaatacatgtatggattttataatatacatatataaaaatctataaaggcatatttttagaaaaacagcacaccactgcttcttttgaaaatagtctgaataagaataaaatgaatttctacagag

SEQ ID NO: 292 - DNA, 2930 bp, Homo sapiens
agcgagctcctcctccttcccctccccactctccccgagtctagggcccccggggcgtatgacgccggagccctctgaccgcacctctgaccacaacaaacccctactccacccgtcttgtttgtcccacccttggtgacgcagagccccagcccagaccccgcccaaagcactcatttaactggtattgcggagccacgaggcttctgcttactgcaactcgctccggccgctgggcgtagctgcgactcggcggagtcccggcggcgcgtccttgttctaacccggcgcgccatgaccgtcgcgcggccgagcgtgcccgcggcgctgcccctcctcggggagctgccccggctgctgctgctggtgctgttgtgcctgccggccgtgtggggtgactgtggccttcccccagatgtacctaatgcccagccagctttggaaggccgtacaagttttcccgaggatactgtaataacgtacaaatgtgaagaaagctttgtgaaaattcctggcgagaaggactcagtgatctgccttaagggcagtcaatggtcagatattgaagagttctgcaatcgtagctgcgaggtgccaacaaggctaaattctgcatccctcaaacagccttatatcactcagaattattttccagtcggtactgttgtggaatatgagtgccgtccaggttacagaagagaaccttctctatcaccaaaactaacttgccttcagaatttaaaatggtccacagcagtcgaattttgtaaaaagaaatcatgccctaatccgggagaaatacgaaatggtcagattgatgtaccaggtggcatattatttggtgcaaccatctccttctcatgtaacacagggtacaaattatttggctcgacttctagtttttgtcttatttcaggcagctctgtccagtggagtgacccgttgccagagtgcagagaaatttattgtccagcaccaccacaaattgacaatggaataattcaaggggaacgtgaccattatggatatagacagtctgtaacgtatgcatgtaataaaggattcaccatgattggagagcactctatttattgtactgtgaataatgatgaaggagagtggagtggcccaccacctgaatgcagaggaaaatctctaacttccaaggtcccaccaacagttcagaaacctaccacagtaaatgttccaactacagaagtctcaccaacttctcagaaaaccaccacaaaaaccaccacaccaaatgctcaagcaacacggagtacacctgtttccaggacaaccaagcattttcatgaaacaaccccaaataaaggaagtggaaccacttcaggtactacccgtcttctatctggttctcgtcctgtcacccaggctggtatgcggtggtgtgatcgtagctcactgcagtctcgaactcctgggttcaagcgatccttccacttcagcctcccaagtagctggtactacagggcacacgtgtttcacgttgacaggtttgcttgggacgctagtaaccatgggcttgctgacttagccaaagaagagttaagaagaaaatacacacaagtatacagactgttcctagtttcttagacttatctgcatattggataaaataaatgcaattgtgctcttcatttaggatgctttcattgtctttaagatgtgttaggaatgtcaacagagcaaggagaaaaaaggcagtcctggaatcacattcttagcacacctacacctcttgaaaatagaacaacttgcagaattgagagtgattcctttcctaaaagtgtaagaaagcatagagatttgttcgtatttagaatgggatcacgaggaaaagagaaggaaagtgatttttttccacaagatctgtaatgttatttccacttataaaggaaataaaaaatgaaaaacattatttggatatcaaaagcaaataaaaacccaattcagtctcttctaagcaaaattgctaaagagagatgaaccacattataaagtaatctttggctgtaaggcattttcatctttccttcgggttggcaaaatattttaaaggtaaaacatgctggtgaaccaggggtgttgatggtgataagggaggaatatagaatgaaagactgaatcttcctttgttgcacaaatagagtttggaaaaagcctgtgaaaggtgtcttctttgacttaatgtctttaaaagtatccagagatactacaatattaacataagaaaagattatatattatttctgaatcgagatgtccatagtcaaatttgtaaatcttattcttttgtaatatttatttatatttatttatgacagtgaacattctgattttacatgtaaaacaagaaaagttgaagaagatatgtgaagaaaaatgtatttttcctaaatagaaataaatgatcccattttttggtatcatgtagtatgtgaaatttattcttaaacgtgactactttatttctaaataagaaattccctacctgcttcctacaagcagttcagaatgccatgccttggttgtcctagtgtgaataattttcagctactttaaaattatattgtactttctcaagcatgtcatatcctttcctattagagtatctatattacttgttactgatttacctgaaggcaatctgattaatttctaggtttttaccatattcttgtcatcttgccaattacattttaagtgttagactagactaagatgtactagttgtatagaatataactagatttattatggcaatgtttattttgtcattttgcttcatctgttttgttgttgaagtactttaaatttcatacgttcatggcatttcactgtaaagactttaatgtgtatttcttaaaataaaactttttttcctccttaaaaaaaaaaaaaaaaaa

SEQ ID NO: 293 - DNA, 4359 bp, Homo sapiens
gggggccccgccgccccagcagcccaggacagccccctctccccgcccccagccccctcccccggcgcggccatggatgtgaccagcagctcgggcggcggcggcgacccccggcagatcgaggagaccaagccgctgctggggggcgacgtgtcggcccccgaaggcacgaagatgggcgccgtgccctgccgccgggctcttctgctttgcaacgggatgaggtacaaactgctgcaggagggcgacattcaggtctgtgtcatccggcacccgcggacctttctcagcaagatcctcacctcgaaattcctgaggcgctgggagccgcaccacctaacgctggccgacaacagcctggcgtccgccacgccaactgggtacatggaaaactcagtctcctacagcgcaattgaagacgttcagctgctgtcctgggagaatgccccgaagtactgtttacagctcacgattcctgggggaactgtcttactgcaggctgccaatagctacctgcgagaccagtggttccattctctgcaatggaagaaaaagatttacaaatataagaaagtgctgagtaacccaagccgctgggaagttgtcttgaaagagatccggaccctggtggacatggccctgacatcccccctgcaggatgactccatcaaccaggccccactggaaatcgtctcgaaactgctctcagagaacacaaacttgaccacccaggagcatgaaaacatcattgtggcaatcgctcctttgctggaaaacaaccacccaccaccagatctctgtgaattcttttgcaagcactgcagagagcggccccggtccatggtggtcatcgaggtgttcacccccgtggtgcagcgaatcctcaagcataacatggactttgggaagtgcccgcgactgaggctgtttactcaggagtacatccttgccttgaacgagctcaacgcggggatggaagtggtgaagaagttcattcagagcatgcacggccccacagggcactgcccccacccccgggtcctgcccaacctggtggccgtgtgcctggctgccatctactcctgctatgaagagttcatcaacagccgcgacaattccccaagcctgaaggaaatccggaacggctgccagcagccgtgcgaccggaagcccactttacctctgcgccttctgcaccccagcccggacctggtgtctcaggaagccacgctgtctgaggcccggctcaagtcggtggtcgtggcctccagtgagatccacgtggaggtggaacgcaccagcactgccaagccggcgctgacggccagcgcaggcaacgacagcgagcccaacctcatcgactgcctcatggtcagccccgcctgcagcaccatgagcatcgagctgggcccccaggccgaccgcacgctcggctgctacgtggaaatcctcaagctgctgtcagactatgatgactggagaccgtctctggccagtttgcttcaacccattccattccccaaagaagctctcgcacatgagaagttcaccaaggaactgaagtacgtgattcagaggttcgccgaagaccccaggcaagaggtccactcatgcctgctgagcgtgcgggccggcaaagatggctggttccagctctacagccccggaggggtggcctgcgacgatgacggggagctgttcgccagcatggtgcacatcctcatgggctcctgttacaagaccaaaaaattcctgctctccctggcagaaaacaagctgggtccctgcatgctcctggcactgagggggaaccagaccatggtggagatcctgtgcttgatgctggaatacaacatcatcgacaacaacgacacccaactgcagatcatctcaaccctggagagcacagacgtggggaagcgcatgtacgagcagctgtgtgaccggcagcgggagctgaaggagctgcaaaggaaaggcgggcccaccaggctaacactgccctccaagtccacagacgctgacttggctcgtttgctgagctccggctccttcggaaacctggagaacctcagtttggccttcaccaatgtaaccagtgcctgcgccgagcacctcatcaaactgccttcgctcaagcagctgaacctgtggtccactcagtttggagacgctggccttcggctcctgtcggaacacctcaccatgctccaggtgctgaacctgtgcgagaccccggtcacagacgctggcctgctggccctgagctccatgaagagtctctgcagtttaaacatgaacagcaccaagctctcagctgacacctacgaagatctgaaggccaagcttcccaatttgaaggaagtggacgtccgctacaccgaagcctggtgaagctcccagctcaaggcaggaagacgtttgcaaccgcgacaaaataactcttgactaacagccgcagagcagccggtcctggggtcccaccctggtgccctggctgtgagatagatggggagtctttctgggggcggaggggggagggggtggggagggggcccacaagcacgcccagcccccgccgaattcttttagcttcgtaattggaacctttgacctgatctaaagtggactttgtagcaacaagaggagcatcagcgggtcggggaggggtttgggggtgggctggggggtgggggaccctttgtggattttctttgcctttgtgtttgatgccgtcgtgtgggaaaagtcaactccgatgccaccattgcgggccggacgaaggatgctttcttcctagaggctccgagctgagctgcgaactcgccccccgcccttgggacaagaagacccagtcacatcactgcacccgtcctgtgtcctcaccattgctatgcaaagtgattcttgttgtacataagatttaaataatgcacctatttaagacatgttgacaaattgcgggtctgggacccgcctcttatttatgaagtctttgaccgtcccccccgcccgaccccaccgccctcccgcccccacctggcgtgtagtactgtataaaccagtcagctgtcgggttagtggtagtattattgttatttttttaaaggaaacaaacagacaacaaaaagaagaaaaaaaaaaagaacctccttggaaaaattaattgctttttcgtaatggattctctatgctaatgctctctcgtctgtctgtctgtctgcccactcccccacccaccactgtgcgtttctgatttccaaatgtctccaactccctcacgaggtggggctcaggctggaggaggagggattaagatccccttgctccactaaggcccaagctctttctctcggcaccttttagacttgaatgggaggctgctaacccgccctctccagtccaccccggtaaaagagctgttccccacccccagggagctcctgtccctgtcagcctttgctgtcccctgtccccaacggagactctgtcacccctgggctccccctgccatcgtgtgcttcacgtggccccatgcatgcccgcctctctgcatggtctcttgggaaaagagagatgtgtcgcctccgccagtccgactgccctccccaccccacccccgccaccccccacatgtgaccactgcaacgaagacactccttctgtccccacctgctccgaagacaaaccaacctccgtttcttttataaacagtcggctttttcttaataagccctcactgtacagaacagcccgttgatggtttatttggggtccccctctccccccagcccttttttctgttggtttagcacaaatacttccctcctccggcacctccaaacctaccccacagtcagtgtacttgttttatatatatttaatcttattcaatggaaaccatgcttttgtcgttttatactttgctaggtagactttattacccccccactatgccctcatttttttaaaaaaggaaaaaaaaaagaaactgggttccagtcttaattcattttccgtgccaggttttatttcgtgtgtgtgtgagtgtgttctgttttgtgttttgttttttgttgttgtttttagttgtttggttttcttttctttcccccctccggtcccatacttcacagcactctggtgcgggaagaagcagaagcaaaaaaaataaaaataaaaaaataaataaaaataaaaaaaataaaaaaggaaaaaaaaaaaagaagaaacaagacatgccacctttcccctcgcactgttgcttttcctgatggttaatactactgtcacgtagctgtgtacaaagagatgtgaaatactttcaggcaaaaataaactgtaagtgactcatcaaaa

SEQ ID NO: 294 - DNA, 1674 bp, Homo sapiens
ccttccttcctctcccaggcccgagccatggcaacagcgtgacgtgggggtaccgagatctgcgggagcagcggtcccggcttcagttctagcctacccggcagcctggacgggagcaaggcgagaggtgctgccgcctcccgtcgcccctgcgctcagaggtcccgaaccagcccagccgctgcctcttgccgctccgcctttggagtgaggagggcgcagcccgcgtcagaacttagagggccaggcagggtcgcgcgcatggcctgggcgggctcgcggcgggtcccagctgggacgcgcgcggcagccgagcgctgctgccggctctcgctcagcccgggcgcgcaaccggccccgcccccaggccctctgccaccgccgcgaccaatgaggtttctgacctcctgcagcctcctcttgcctcgggctgcccagatcttggcggctgaggctggcttaccttcgagccgttccttcatgggatttgctgctcccttcaccaacaagcgaaaggcttactcggagcgtagaatcatggggtactcaatgcaggagatgtatgaggtggtgtccaacgtccaggagtatcgtgagtttgtgccctggtgtaagaagtctctggtggtatccagccgtaagggtcatttgaaagcccagctggaggttggctttccacctgtcatggaacgttacacctctgcagtttccatggtcaaacctcacatggtcaaggctgtttgtactgatggcaagctcttcaaccacttagagactatttggcgattcagccctggtattcctgcctatcctcgaacctgcactgtggacttttcgatttcctttgaatttcgttctctgctgcactcccagctggccaccatgttttttgatgaggttgtcaaacagaatgttgctgcctttgagcgtcgggcagccaccaagtttggtccagaaacagccatcccccgtgaactgatgttccatgaggtgcaccagacttgaggcaagggattgctccctgacctcccttctaccccacttccctacacaattctcttatttatttggtttggctcctgttccaatttgaaaggagtctgtgttcataatactgtttctcctctcaatttcccagaaattgggttctatgctggctggaaatgttgggggaaagagaaggcaaaggatgtggaaatgagatgtgcttaggaaagggtcaggcccatcgtaggagcaccatatgcctgcagccttttcactacgaattagaataaggactatgtggttgtctctggaccttatcaagacaccttagtgtctgaccaggggacgatagtaacttttctaaggattgaataaattgagcttttcttctggcacagaggtactgagtggtaagtaacttttaccctgcctgagattcctcaggagaaaaggcaacctgcctccagcctgaaatacataaagcctcattttaagactgtaagtccatgctgcctggctactagagagcaaggggctttcttaccaccagtgctgaggagaaaagtactgaacggaaacggagttgtctttgtactcttgagttgtaccttattcttccacttggcctgagtttttataaaatttcaataaattgtgacagtgtgaaaaaaaaaaaaaaaaaaaaaa

SEQ ID NO: 295 - DNA, 6498 bp, Homo sapiens
cggggccggggcggggccgagcgcggcgcagcggagcggggcagagcatcctgcgccccggcgcggggccctgcggtagcctcaggcccctcccctggacccgccgcagagccagtgcagaatacagaaactgcagccatgaccacgcacgtcaccctggaagatgccctgtccaacgtggacctgcttgaagagcttcccctccccgaccagcagccatgcatcgagcctccaccttcctccatcatgtaccaggctaactttgacacaaactttgaggacaggaatgcatttgtcacgggcattgcaaggtacattgagcaggctacagtccactccagcatgaatgagatgctggaggaaggacatgagtatgcggtcatgctgtacacctggcgcagctgttcccgggccattccccaggtgaaatgcaacgagcagcccaaccgagtagagatctatgagaagacagtagaggtgctggagccggaggtcaccaagctcatgaagttcatgtattttcagcgcaaggccatcgagcggttctgcagcgaggtgaagcggctgtgccatgccgagcgcaggaaggactttgtctctgaggcctacctcctgacccttggcaagttcatcaacatgtttgctgtcctggatgagctaaagaacatgaagtgcagcgtcaagaatgaccactctgcctacaagagggcagcacagttcctgcggaagatggcagatccccagtctatccaggagtcgcagaacctttccatgttcctggccaaccacaacaggatcacccagtgtctccaccagcaacttgaagtgatcccaggctatgaggagctgctggctgacattgtcaacatctgtgtggattactacgagaacaagatgtacctgactcccagtgagaaacatatgctcctcaaggtgatgggctttggcctctacctaatggatggaaatgtcagtaacatttacaaactggatgccaagaagagaattaatcttagcaaaattgataaattctttaagcagctgcaggtggtgccccttttcggcgacatgcagatagagctggccagatacattaagaccagtgctcactatgaagagaacaagtccaagtggacgtgcacccagagcagcatcagcccccagtacaatatctgcgagcagatggttcagatccgggatgaccacatccgcttcatctccgagctcgctcgctacagcaacagtgaggtggtgacgggctcagggctggacagccagaagtcagacgaggagtatcgcgagctcttcgacctagccctgcggggtctgcagcttctatccaagtggagcgcccacgtcatggaggtgtactcttggaagctggttcatcccacagacaagttctgcaacaaggactgtcctggcaccgcggaggaatatgagagagccacacgctacaattacaccagtgaggaaaaatttgccttcgttgaggtgatcgccatgatcaaaggcctgcaggtgctcatgggcaggatggagagcgtcttcaaccaggccatcaggaacaccatctacgcggcattgcaggacttcgcccaggtgacgctgcgtgagcccctgcggcaggcggtacggaagaagaagaatgtcctcatcagcgtcctacaggcaattcgaaagaccatctgtgactgggagggagggcgagagccccctaatgacccatgcttgagaggggagaaggaccccaaaggtggatttgatatcaaggtgccccggcgtgctgtggggccatccagcacacagctgtacatggtgcggaccatgcttgaatcactcattgcagacaaaagcggctccaagaagaccctgaggagcagcctggatggacccattgtcctcgccatagaggactttcacaaacagtccttcttcttcacacatctgctcaacatcagtgaagccctgcagcagtgttgtgacctctcccagctctggttccgagaattcttcctggagttaaccatgggccgacgaatccagttccccatcgagatgtccatgccctggattctaacggaccatatcctggaaaccaaagaaccttccatgatggagtatgtcctctaccctctggatctgtacaacgacagcgcctactatgctctgaccaagtttaaaaagcagttcctgtacgatgagatagaagctgaggtgaacctgtgttttgatcagtttgtctacaagctggcagaccagatctttgcttactacaaagccatggctggcagtgtcctgttggataaacgttttcgagctgagtgtaagaattatggcgtcatcattccgtatccaccgtccaatcgctatgaaacactgctgaagcagagacacgtccagctgttgggtagatcaattgacttgaacagactcattacccagcgcatctctgccgccatgtataaatccttggaccaagctatcagccgctttgagagtgaggacctgacctccattgtggagctggagtggctgctggagattaaccggctcacgcatcggctgctctgtaagcatatgacgctggacagcttcgatgccatgttccgagaggccaatcacaatgtgtccgccccctatggccgtatcaccctgcatgtcttctgggaactgaactttgactttctccccaactactgctacaatgggtccactaaccgttttgtgcggactgccattcctttcacccaagaaccacaacgagacaaacctgccaacgtccagccttattacctctatggatccaagcctctcaacattgcctacagccacatctacagctcctacaggaatttcgtggggccacctcatttcaagactatctgcagactcctgggttatcagggcatcgctgtggtcatggaggaactgctaaagattgtgaagagcttgctccaaggaaccattctccagtatgtgaaaacactgatagaggtgatgcccaagatatgccgcttgccccgacatgagtatggctccccagggatcctggagttcttccaccaccagctgaaggacatcattgagtacgcagagctcaaaacagacgtgttccagagcctgagggaagtgggcaatgccatcctcttctgcctcctcatagagcaagctctgtctcaggaggaggtctgcgatttgctccatgccgcacccttccaaaacatcttgcctagagtctacatcaaagagggggagcgcctggaggtccggatgaaacgtctggaagccaagtatgccccgctccacctggtccctctgatcgagcggctggggacccctcagcaaatcgccattgctcgcgagggtgacctcctgaccaaggagcggctgtgctgtggcctgtccatgttcgaggtcatcctgacccgcattcggagctacctgcaggaccccatctggcggggcccaccgcccaccaatggcgtcatgcacgtcgatgagtgtgtggagttccaccggctgtggagcgccatgcagttcgtgtactgcatccctgtgggaaccaacgagttcacagctgagcagtgtttcggcgatggcttgaactgggctggttgctccatcattgtcctgctgggccagcagcgtcgctttgacctgttcgacttctgttaccacctgctaaaagtgcagaggcaggacgggaaggatgaaatcattaagaatgtgcccctgaagaagatggccgaccggatcaggaagtatcagatcttgaacaatgaggtttttgccatcctgaacaaatacatgaagtccgtggagacagacagttccactgtggagcatgtgcgctgcttccagccacccatccaccagtccttggccaccacttgctaagcagaagatcctgcagacccttatctggaggaggaagagaagcaggagagagaaagccacagccagcctgccataggatccaactggacaacgtgtgggatggacctggaaacaagcacctccccaaacacatcaccactccctagggcggggcctgtgcatgctctcccatgacatctccatgctggtttctccatagcataaatgaaaaaaaaaaaaaaaaagtaaacagggcagtgtgtgctttttcttttctcccccctcaactatattaagaactcctagtttcaccctttctccatcccatcatcccacctatctgtggttgcttcccaagacctcctcccaagatagacatctcctacccagtgcccttgtgtgaccccaggactcaagtctcagactgtgaacagatgtggccatgcccagagacgccagcctggccagaagggcatgcctcagcttactacttcatctctcctggttccctccctgcagtgccccgggtgtcatcttctcccactctgggtaccagggattctaccacataggcttcccaaagccccattctaactcccctctctcagggaagccctagagagaggtccaaaaagcattcacagctgtatcacactctatgcaggtggggtaggagactgatcaggcctgctgtggggaagcagtatgtatgaacacagccagaaatgtcatagtccaaacaggatgctttcaggccatctcagctgcttgatggtgagatggttcccttattccttcaggaaaggcttagcattgggccacataggggaagcagctttgaacaaatcagtcatagcactgcctatagcattagccagtgaccaaattagggacaacgtcttggcacagaattgcttatcaaggaacatttccacaagaaagaaaatattaaggggttatttccacagaagcccaaaacgtcttggaaacacagaggtgaggaggaggaatagtaattgtcaatgagcttttaataccaagatacaccccctgcccccaaagaagagtcctcttttagggaatcagaaccttcattgtcctagaagctgaaagattcttggaacattttagcttttactctcaacttgctgttctctttacattccttaagttagactttcgggtgtggcttctctcccaggggtaacatttacttccattttctagactgaaccaaaagtcttctgcagaatctcccaccgagtgtggtaagaaggaaggacaaaaggctttaggatataaatttcatgttacagagcatgtcattgtcaaaggaaatctgtggccctgagattttaagaacataaaatgtgacatttgatatttctccagcccagggaagtaagatggttagcaatggttgccttaatcaaatggtcccatttttaaccccaaaggaagtgcccacagcaagaggtttgtgtgatgcacttatgtcctccggtgaggaaagggggccacatatgaaaggccccttaggtcagatcctgagagtagcacatttgagtgcagattcctgggccccacctcaaacctactaattctgaatctctgggaatagggccaggaaatctgccctttctacaaactacccaagttgttctgttgcacatcaatgtttgggaaccactgctgtaagggaatcattctggtcaccttgagctttgagctaccactaagccatgaaagaaaatacatcatacagggaagagagaagggaggaggttccaagtagtaactggcagatcctcctgtctggaggtaccaccttctattctggtttctgacttttccttcttgatgaccatagatgtgttccagaggcaaaagagacacattatcccagatggcagaacatgctttcaaaacatataaaatgtcaaagttccagatccttctacatctttagtcctgtctgaggatggtagctggctctctgtagctgatagatggctagagttccatccaaatccttgaccacgacttcatggagatttgaataatctatttgatgagatttctatttcaataacccacctctctcaccccacattcatatccctaaatttgaccctctgggccgagtcacattaccttcaggagacttgatcccagtagactgaggtcttccctttcagcagaaagatttcatttccctggcttgccagtggcactgatttccgaacacccaatgagtttaatattctttcctccttggcattactgccccagcctctttttattttttttgtgtgtgtctaataaccaggaaaaaaataaagcttaggttttaaaaagttttaaaaataatctgtttcagaaactgtcaaatgtaccatatttgtattaagagttgttgggaatttttgtacaatgaatttacatttatttatggtgacatatttacgcttgtgatcaaataatgatgttaaattcttaaatcatatttgctatgcagctgaagatgatattttgatttgtattttgggggtacctgtgttgagttgataaacatttccatcttcattaaaactgcttccaaactagtaaaaccagcaa

SEQ ID NO: 296 - DNA, 7500 bp, Homo sapiens
ggccgctgcagcccggcgctgaatgggctggcggcgcccggctccgtcctgcccgcggccggcccccgcgtctgctccctccccgcccgggcccctgtcggccgccgccagtccccgccccgactgtgaatgaaaggcgggcgccgccgagggctggctgggaacgccgcagcgacgccggcctctcgagaggcgcgcgccccgccgagatgtacggtgtgtgtggctgctgtggtgccctacgccccaggtacaaaaggctggttgacaacatcttccctgaggatcccgaggatggtctggtgaagaccaacatggagaagctgaccttctatgccctctcagctccagaaaaacttgatcgtattggcgcctacctctctgagaggctcatccgtgacgtgggtcgccatcgatatgggtacgtgtgcattgctatggaggctttggaccagctgctcatggcctgccactgccagagcatcaacctcttcgtggagagcttcctcaagatggtggccaagctgctggagtcagagaaacccaacctgcagatcctcggcaccaactcgtttgtgaagtttgccaacatcgaggaggacaccccgtcctatcaccggagctatgacttctttgtgtcccgattcagtgaaatgtgccactcgagccatgatgacttagaaatcaagaccaaaattcgaatgtcaggcatcaaaggcctgcaaggggtggtgaggaagacggtgaatgatgaactgcaggccaatatctgggacccacagcacatggataagatcgttccatcactgcttttcaatctacagcatgtagaggaggcagagagccggtctccctcacccctccaagcacctgagaaggagaaagagagccccgcggagctggctgagaggtgtcttcgggagctgctgggccgggctgcctttggcaacatcaaaaacgccatcaagcctgttctcatccatctggataaccattctctttgggaacccaaggtgtttgccatccgttgctttaaaatcatcatgtactcaattcagccgcagcactcacacctggtcatccagcagctcctgggccacctggacgccaacagccgcagcgctgcgacggtgcgcgcgggcatcgtggaagtcttgtcggaagccgcggtcatcgctgccaccggctctgtggggcccacagtactggagatgttcaacacgctgctgaggcagctgcggctcagcatcgactacgcgctgaccgggagctacgacggggcggtcagcctcggcaccaagatcatcaaggagcacgaggagcgcatgttccaggaggccgtcatcaagaccgtgggctcctttgccagcacgctgcccacctaccagcgctccgaggtgatcctcttcatcatgagcaaggtcccgcggccatccctgcaccaggcggtggacacaggcaggacgggggagaataggaaccgtctgacccagattatgctgctaaaatccctcctgcaggtatccacaggtttccagtgcaacaacatgatgtcagccctgcctagcaacttcctggaccgccttctctccaccgccctcatggaggatgcagaaattcgactctttgttctagagattctcatcagtttcattgatcgtcatggcaaccgccacaagttctctaccatcagtaccctcagtgacatctctgtcctgaagctgaaagtggacaagtgctctcgacaggacaccgtcttcatgaagaagcactcccagcagctctacagacacatctacctgagctgcaaggaggaaacaaacgtgcagaaacactacgaggcgctctatggcttgctggccctcatcagcatcgagctggctaacgaggaggtggtggtggacctcatccgtctggtgctggctgttcaggacgtggcccaagtcaatgaggagaacttgcctgtctacaaccgctgtgccctctatgctctgggcgcagcctacctgaacctcatcagtcagctcacaacagtgcctgccttctgccagcacatccatgaggtgatagagaccaggaagaaagaggctccatacatgctccccgaggatgtgtttgtggagaggcccaggctgtctcagaatcttgatggggtggtcattgagctcctcttccgccagagcaagatcagtgaagtcctgggaggcagtggctacaactcggaccggctctgcctgccctacattcctcagctgacagatgaggatcgtttatccaagaggaggagcattggagagaccatctccctgcaggtggaggtagaatcgaggaacagtccggagaaggaggagcgagtgcctgccgaggagatcacctatgagacactgaagaaagccattgtggacagcgtagcagtggaggagcaggagcgtgagcggcggcggcaggtggtggagaagttccagaaggcacccttcgaggagattgctgcacactgcggggcccgggcatcgctgctccagagcaaactcaatcagatctttgaaatcaccatccggcccccaccaagcccatcaggaaccatcactgcagcctacggtcagccgcagaaccactccatccccgtctatgaaatgaagtttcccgatctgtgtgtatactgaattccaagagcctgagctcctcaaggagatggggtctgaggaggggctcacctcacgcccaccccgaccacatggagatctggctgtgatctctgagaaaacatcaccttagatggcagcgcctcccaggctaagccaaggtggagactctctggtccttcttggccctcctacctcctcctcgtcttccctgagggaggtctcaccaatcagcatctcacctgtgccctctttgtcttctcttgtgtcagccaggggcagagaatcatggggtgtctctcaggagaagccggggggagggggctgagaagctcctacttggtgttttgagtgaagggcatgtcctccccagaggacggagctggatggagacttggttggtgagaggaagctaaggactctactcccctggggaaggaagctgagatggggatggctctctcctccccagcactccccctgctccccgcccatgtccctgctgtgtctctcactctcttgctcatctcccagttgtctgttcatgtttctttctactattaatgaatgctgagcccttataacaggagctggggtggagacatcacgaggggtcgggggacagcaaagggcaggaagcaggatgcagggctggcaggaggtgggcctgtggcatcagcaggcccagcgggcgagtgtggtccctgcagcagcttcccacctcctttgttcataaggagcttgtgttggcctcccacagtcctgtctgctggacgtttttcagagttgggttctctctctttgatgtctttcttctgagggtcccaaggtgttcctggagcttctgggttgaggaaaggcagagcaagataatcttggaggggaactacagggtccccaagatttgcccacatcacctcctatggaaaaggctcccagcctgacctgggttgtaggagagtggggagggtgggatgagtggtgttttggggctcaaggatatcagaagccaactttttggatgttccgtttgaagaaagaaggatctaacacctaatattggaatgatttcttcactctctggacaaagtctgggacatcagcaccacctggcaacgcttgtggcttgggaggagccatggagacccctttgggttctgggttcctgttttcctggtgtgccgtctgtgtctctgtgtaatgaggatgtgcagagaggagctaacgcggagccgggcagagccacccaggaggcagtttgttgccttctttgccaattccccttcccggcccctcctccaggtgcctttgtgtctcccggggtgccactgacagaacctcacctggggctcctcccatggcagtgccatgtggtccaaaattgccctttccttctccgttagtcacatttcccataactcctccgagccaacataacctacagtaagatgtgagtgtcagacgttctctccctggagtctgctttccaaaggaggcagggtgagtagatttcttgatccaaaggaatccgtttttaatttttttttttttctagagatgggggtctcactatgttgcccaggctggcctcgaactcctgagtttaagtgattctcccacctcagcctcctgagtagctgagaatccctttttagggtacaatttcaggcagtgtggcatggagtcagaagcaggctgtttctcctcaggggagggcaggcttctcaggacggcctcagctcatagccccacgtgtggtgtgcacggatgtgcagggagagcctgattgttaggtggatgtattttccagaatcggggagggactgaacacgagcatttcccattaatatgtgcaataaatgtcttggggaaggggctatttgaccctcattcccatagttttggcacttcaaatgaagctcttccttgtggtcaccatctctgctgtgggcacacagcttctttttcttgtttttttttttttttttttttttttgagacaccgtctcgctctgtcacccaggctggagtacaatggtgtgacctcaactcactgtgacttccgcctcctgggttcaagtgattctcctgcctcagcctcctgagtagctgggattacaggcgtgcaccaccacgcctggcgaattttgtgtttttagtagacatgaggtttcaccgtgttggccaggctggtctggaactcctgatctcaagtgatccgcccgcctcagcctctcaaagtgctgggattacaggcgtgagccactgcgcctgcttggcacgtggcttctgaatggcctgagtgagggcagggcccaggcatggaggctcctgcacccccaaggctttttggctgtgctttatggcctctggcttatactcaacccaattttacaagcatgaacttagacttctctttagtatttatatatttaaaaaccaagtttaaattaactcaaacttgacagcaactaacctctgaaagaaactttaaagaaaattgaaatcttgagccacaaacatgttctttcctcactagctcctcccaggttttatcctgcacccagcttggatgagagacccactgtttcttgtgcctacttaacattagggttccccgtggcagcttcatcctgagcactgcctgtgagccctggttctgggacttggcagtcgcctccctggagcatctttccagagccagcattagaacctgagatccccagatgtttctgcccctcatccccatcctgtgaatagagagacagaaaaggtgcaggttcccattctgcatagattctgctgtttcctctccaccggtcccaggcagcttttcctttccatcactgccgcttagcaaaaatgtgcttcttttgaagaactggtcattttttttgagtgccctcttctcagttttgtttaaacttacactcagtagagtgttgggttgtctgctgacatggagtagaacctggattctggccaaataggccagaatcggaaaggtgaaggtgagtgtgatagtaggtaatctcctcaccccagcacaggccctgggagagaggcaaagcagtttgatgggatctggaggggagggaggtaccctggcccttggtctagcatcagtgagtcctgcccttccaagcccctggaggctagtggcattgcattgtgcccctttttgccacccttctctgatgtgattttgagcgaagaggagtcagtaagcccattgagaccggctgctcccaaagcccgaggactctagctgtgtggggaagggctagcattggtcaggactctgctgacagcactgagtaggcaggaatgtatttgagatttggaagtactgttaatttggtggagtcaggtgaatggataagaggcagatcggcagaaagcatcagtgtggtcccgaggctccctctgttttccttgccatggagtccccagcgccttgtgcctgtttccatttccctctctctttgaaaagtagaaatcagtggtttcttgactcctaaacagcctcctcactatagaaggagcctgagcaggtcagaagaactagaaaagtcctcagatacccccctctgtccagccccctttcccatacacagatatcaatggatgagcaggaaaagaggaggcctggactcactgaagtacttgaagaagcacaagtgtcatagatgtgccgccctttgccctgggtgttctagatcacacagaacacgtttcagctggactaagaatcagactagccaggggttcttctgaacagctcaggccagacctctgggctcctctgggggccctgggacatgatgccttgcagtttccattccattgtccccaggcctcctgacctggtgacagagagtgccctgcagaagtgagtctatttttcccaattcctcttcatgaccagaaaatggcagctggccggttggggtcctgtgggaaagggctaacctgggctgttaggtagacactaggtttaaaggtagacagggagatggcatcatcagggcaggccaggcccacttcctgtgaccccagaccttggcaggcgggtcgtgctgaaaccaggcatctccctcacacctggggaaaggtttagggcaacatgttgcctcttcatcccattaaccctagaaatcttctggttagagtggccccttaccccaaatctggcctaggtctgaagactgcaggatagtcatgatgggcccatcctagagcctggctagctggaagacgcggtatggcagggacaggagggcggcaggaagggctttgtggccctgctggggccaaaggcagttttctgtgctccctttagccccagcctggctggccaggtctcctgtacttcaggggaccatggggccgcccaagccagtcaccttccccttccaagctctccccccatgactgttgatttctggcgcgtggaggcagagttgtgaatccacaaatgctgtagcccatatctcgtaatgtgtctgtgtccacttagagcctcacgacctggctgtgtgtgtgcatgtgtgtgtagtatagtttgtagttgacaatatgtgtatataatagctggtgtatttatatgtgagtgcagaattagtgcccgtggcggttttctgtattttaaacccattgaattggttagttttattttagggaagtgggaaaggcggagtggggggaagtataggaagaaggattcttagcaaaatcattctctaggactattagtcgcgatctcccagtgagccatcacgatgcccttttcaaataaatgttaatgttgtcaccaaaaaaaaaaaaaaaaaaaaaaaaaaaaaaaaaaaaaaaaaaa

SEQ ID NO: 297 - DNA, 2096 bp, Homo sapiens
gcctttgcgcacgcgcacgaacgcacggccgcgcagcatctgtcttgctggaagctttttcctagaggttgagcggtttgcacaatgtcggaaatggctgagttgtccgagctgtatgaagagagcagtgacctgcagatggatgtgatgcctggcgagggtgaccttccgcagatggaggtaggcagcgggagccgggagctatccctgcgtccctcccgcagcggggcccaacagctcgaggaggaaggcccaatggaggaggaggaggcccagccaatggcggcgccagaggggaaacggagccttgctaacgggcccaacgctggggagcagccaggccaggtggcgggcgcagacttcgagagcgaggacgagggcgaggaatttgatgactgggaggacgactacgactatcccgaagaggagcagctcagtggtgccggctacagagtatcagccgctcttgaagaagccgacaagatgtttctgagaacaagagaaccagccctggatggcgggtttcagatgcattatgagaagaccccgtttgatcagttagcttttatcgaagagcttttttcactgatggttgtcaatcgtctgaccgaagaactcggctgtgatgagattattgatagagagtagttagatgctgttaaaagaggaggaaactacttgaggagggacccaactttccgctatcttttgggttcattccaaatagttttgtgccattgaaaaacttgaccttcaaaaaaatttgtttttcagaatagaacacaataggacagtgactgcacagttgtgaaaaaggaagagaatcattaaagaaaaagaaaaaagattttaagaccgttgaaatcaattatcaagaacgtcctaaaacacctatggctttgactttgttattgatccagattattttccttgcattggggaaaatatctttcatatttgtttgctgtaaagatggttttgcaagaataagtcatgaccaagacaaactgccaatacaaaagcccactgatactaattatataatgagaaaaaaatgtatccaactaggacacatatcttttgagttatttggactgaaagcttaagaaaacttggaaaattctattttgtgatctagtcaagccacagttatcaaaggctacattttcagtgtaagataaatggatgagtaaactcaaatatgtatcacgtgtgctttgtatcttaagatgtgtttccaagagcatctgaaattttgtttgtacatgtatcttgatcatttataaagccactgtgatctataaatcaagaaaatccattgtcataaccatttttaaaagtcaaaaattaagacatccttaattaaaaagtttcaaatctagacactaaatgtgtgtgaatgtacaaagaaaacaaaccattgcttatgctgttatatactagagaaattttgttttgcttgctgttttaacttgacagatgaaggactttagttgaacttcatattgtaagaactgttaataaaagttgtcaagtaaaaagcgctatatctaaaaagactttatgaacagttattctatcaacttttaaaggttttaaacctgcccagaaattaccttggtatctgaagtttccctctgtctcctcctctaattaagcttgttatttgtcatgcaccagcattggagataataaaatttcttgttctgtgtattttgtttggctaatagtattgcatacatactttctctgtatactactttctattgtatgtgttaaccagtattaagggaaaatgatccagcttcagctatctaattcacaaattaatttctggaaattaaactttgtaaattaagtttttgcctataagaatttgctggtctgggaaaacctgccctatcaatgagtatgttgccgtggttaccttactaagatgctgaagttctaggagagtaatgattacatcagaaggctaggttcagcaaaataagtgtatcagcaggttttatcatgatcagtaaaaatgttccaaatgcttctgctccattatagcagtaaagaacgaatatccaatgcaacaggacaattaaaaa

SEQ ID NO: 298 - DNA, 3785 bp, Homo sapiens
acagaaggaagagcgcgaaattgcccaggatggacactttcaaaggggccccagcggctaagtgactctcagggaaggtggccttgccatcccaacttctatttaggggcaaccactagcaagttcttctcttcgggcaattggaaagagttcctataagcaaagtggaggtgatgtggacccctggaaaatttccttgccccgtttgaactttgcaatgattcactgcaagtcatgtccacgtggaaagcaagactcaccaaaagactgaagtctccctctagaagcatgcatccatttccgtgctcagctctgctcgcctgttttgggaatacgagggagagtgcttccttcaatcagtccggcgtggctgatactcattccaccgtccgtgtgcagcctgtggccaaagcaggcagacagccaagacacccaagcgcagaaggagctccagagaaaaggcaagattcgagcacccatgcagagagaaatggcagtgcgaatcggaattcaagtcaccgcactgcggcccagcccgcggagacgcctgaagatgtgcccgggtccctggatgatggggcggactgtgaagcagtggtgtttcacgcttccatccccagaccatcaattattgacacgcccaaggaagaagaatttcgagaagaacctaaatgcctcgagctggagcagaaaatgacatcagacagcccacctgaggatattgaccataaggactcatatctcattacaagaagcatcatggccgagccagactacatagaagatgacaatcctgaactcattaggcctcagaaactgatcaatcctgtaaaaacctcccggaaccatcaagatcttcacagagaacttcttatgaatcaaaaaaggggtcttgctcctcagaacaaaccagaattgcagaaggtgatggaaaaaagaaaacgagaccaagtaataaagcagaaggaagaagaagcacagaagaagaaatctgacttggaaatagagctattaaaacggcagcagaagttggagcagcttgaacttgagaagcagaaattgcaagaagagcaagaaaatgcccccgagtttgtgaaggtgaaaggcaatctcaggagaacaggccaagaagtcgcccaagcccaggagtcctaggctgaggctgcaccaagacctcgtgtgtcaccccacagagctgtctgtgggtgccttctcaatctcagggcaatagcccctggagaatatttcagccagcagagaattttgacttgcagtaggatttggtttgattttcctacgatctgggtggatgccttgcctgtgacagttgcagttcctattcgccaaatgaagggcagtgccccgcacgtaagttggaatgatggacctgtgttcagagacttaacagaaccaacaagcaaaacaagtgagaacaggaaaaaggaagaggacactggaatcaattcttgagagttgcactacttggtttttcttccattccaagtttcgtgggacccagagccttttttcttttaaaagctaaaaaacaagtgtttaattcctctttttgttatctgttagataattgagatcacctagaaatgcgtttaatctgttcactcactgtaaattttgaggacccagaattgtcttgtttaatttatactttcacccctgttgcagttaacaccagagaaggaacgtgaatgtcgagcacagccactacccttgttggcacttaatttagaaatagggtgagaagtttaaaagcccatcttgattttattttcattccttttggttctctgtgtaataatagcaggctacatagtgacattccagttccaagaaggtacatcctgtccattcattaattgctttgattactaggagggtttctgttcagttttgtttttaaatgtcttgctgatctagttctttcagatggaataaccttccagtcccttagagagtggaactagtccatataacccagcttcagtagcaaaagtagaagccgccacatcttttcatttctccaagaggagagtggggaaggttcccatgaccagctgggcagtcaggatttctctaggcattctaatgtgaaataagtgtagactgctgtcaaggaggcttcatcagaagatgtatagcatttgaatgtctaatgataatgcatatcattagaatccaagctttgaaaatttctgattaatgctcatgtatttctttatctttgtttttccttgtgaagaaagactttcaccactgtctgagtgatgatgctgttgataaggatgatgtcgatgactactatattgcatctctcaggaacagctgatgggaagggaggggctgctgagttcccttgttctagctagcagcacgctcctcagagagggggccgagttacagacagcagccgcattctcatgcaaaattagttttaaactgctagtgtgggcatcggtaccttttgcctgggtgataccgaagaattgttgaggatttagtatgctccgtagagacagttcagccagtcatttctgcattggagagacttctcatactttctttgaagactcatagaaagctggatctagagctcttgaatccttaattagcacagtagaaattagctttctatgggaatgctttagtgttagcagttgacaattaggcccatattcaatctgaatgggaacaaaagtaaatgcaatgataatatactgctagttagagaaacatgttagttgattatacctgaaatggattatttatctcatcagcaagtattatttgaataaaatgagaaatgcttaagaaaaattgttgctctacagtaatttggtttcgaagaatggaatggtaactattttttcccatcgttcttttgagagaaggaagtgtgatgactgatgatcttgaaaagcccatttctgattgcacgttgactggaattctttctttgtgtctgtggactagcgatgctgtttgtaaaatgaagattcgggactggctcatatctttttatctaactagatgtcagatcttgaaatctgtattctcgaagcaattctgccacttgatcgtattcacaggggccctggtaggctcctttagaaggaccatttctgttcctagagcttaactagaattcattcttcactgaaaaaaaaaaaagttacttaagaaagcatttctttcctaatctcactcaaatctgcagaattatttgtaattagtaatacaaaatctggccaaaaggagacttgtaaatagcgtaaagtggtgtcttatgctaaacggtggaatgtataggcagagaagctctttgaagttgtcagatgagctgggctcacaagcctgattcaaacaggctgtcggtctcctctcaccccttaatactgtgcagcccaaactcctaggactcttgaacatctgagcagttttgtgctttgagccactttttgacaaaaatggctccatttttccacagcgtggttttcttaaaatagtttaatgttttatagtctcatagtagtagtgttgctttctaagctataacagtcgaccttattcttctactctgaaaaatcttgacttgtttgagtgtatataatatatataaagggagccttaatggattggttttcataatttaatattttttgtatttgctcttgtataattgtttttaacggaaagtattaaagaattgagggtggaattcttagaaccaaagttattcttaataaaaatcaccacatgcttggaccatg

SEQ ID NO: 299 - DNA, 3557 bp, Homo sapiens
agattgcgcgagggggagcgagcgagcgggcgctgccaggagcccgcagccctggcgcccgccgccgcccggagccccgcaatatgccgccgcggccctctggctctaggccatggcgaggctctgccggcgtgtcccctgcaccctgcttctcggcctggccgtggtgctgctgaaagcgcggctggtccccgcggccgccagagcggaactcagccgctccgacctcagcctcatccaacagcagcagcagcagcagcaacaacaacaacaacagcaaaagcagctggaggaggctgaggaggagaggacagaggtgcctggggcaacctccaccttgacggttccagtgtctgtatttatgttgaaagtccaggtgaatgacatcatcagtcgtcagtacctgagccaagcagttgtagaagtgtttgtaaactacacgaagacaaattccacagtaactaaaagcaatggagcagtgctgataaaagtaccctacaaattaggacttagtttaactattattgcttacaaagatggctacgtgttgacccctctgccttggaaaaccagaagaatgccaatatattcatcagttacactttcactgttcccgcaaagccaagcaaatatatggctatttgaagacactgttttaattactggaaaattagctgatgccaagtctcaaccaagtgttcagttttcaaaagccttaattaaacttcctgacaaccatcatattagcaacgttactggctatcttacagttctacaacagtttttgaaagtggacaattttctgcatacaactggaattactctcaataaaccaggttttgaaaacattgaattgactcctcttgctgcaatatgtgtgaaaatatattctggaggaaaagaactaaaggtcaatggctctattcaagtttctcttcctcttctacgtctgaatgatataagtgcaggggatcgcatacctgcttggacatttgatatgaacacaggtgcttgggtaaatcatggtcggggaatggtcaaggaacataacaatcatttaatctggacatatgatgcaccacatttggggtactggatagcagctccacttccaggaactagaggttcaggtataaatgaagattccaaggacataactgcctaccacacagtgtttcttacagccatattaggaggaacaatagtcattgtcattggattttttgctgtactactttgttattgcagggacaagtgtggtactccacagaaaagagaaagaaatatcactaaacttgaggtcctcaagagagaccagacaacttcaacaacacacataaatcatatcagtacagttaaagttgcattaaaagctgaggacaagtcgcagttattcaatgccaaaaactcctcatatagtcctcagaaaaaggaaccatcaaaggcagaaacagaagaaagagtttccatggtaaaaactcgggacgattttaaaatctacaatgaagatgtttcatttctatcagtcaatcaaaataattactcaagaaacccaacacagtctttggagcccaatgtagggtccaaacaacctaaacatattaacaacaatctatcttcatctctaggtgatgctcaagatgaaaagaggtatctcacaggtaatgaggaggcgtatgggcgttcccatattcctgaacagcttatgcatatttacagccaacccattgccatccttcaaacatctgaccttttctccacaccggaacaattacatactgctaagtcagctactttgccaagaaagggacagttagtctatggccaattgatggaaccagtaaatcgagagaactttacgcagaccttgcccaaaatgccaattcattctcatgcacagcccccagatgccagggaagaggatatcatacttgaaggtcaacagagcctgccatcccaggcttcagattggagccgatactcaagcagcttactggaatccgtctctgttcctggaacactaaatgaggctgttgtaatgactccattttcatcggaacttcaaggaatttcagaacagaccctcctggagctgtccaaaggaaagccctccccgcatcccagagcctggtttgtgtctcttgatggaaagccagttgcacaagtgaggcactcctttatagacctgaaaaagggcaagagaacccagagcaatgacaccagtctggactctggggtggacatgaatgagcttcactcaagtagaaagctcgagagggagaaaacattcatcaaaagcatgcatcagcccaagatcctttacttagaagatttagacctaagcagcagtgagagtggaaccaccgtctgttcccctgaggacccagctttaaggcacatcctagatggagggagtggagtgatcatggagcaccctggagaagagtcgccaggaaggaaaagcactgttgaagattttgaagctaatacatcccccactaaaagaaggggcagaccaccactagccaaaagagatagcaagactaacatctggaagaagcgagaggaacgcccactgattcccataaattaactccaatggggattgtgtgtctgctgtctcgtgctgtttattcttgcttcttgttgtaaattgcagtacgaacttaagaaaatgagactgagcaatctcatggttcttggacatgtctcaagcagagtaaatggtaattcagtaatcagagagaaagataccaaggaatgctttttctggcctattcatttatttttgggtgatgaatttacagtatctaagttttcaaaatgtaaaatagcttcaagatgttagttatctgaaaatgttgctcagccagccagtttggccttgactctcttaagaataacagtgaaatatatactcctcaagttgcctccaaaaatgttgcctctaccatggtgactaccccatggaacatttagaaacaaaactgacttcaggcatcatattattttaaatgttactattacgtcttcttctgcctatacttaaaaataacttgataaatgacttggactgatgttactctggagttatcacaaagaaaatgttgtttggtctttaaagagcatgtgtattgtatcatcccaaacgtaaatcctacatttatataagatgggcaagaagctacttggtcattagagagggagacaccagctctttggttgtttttggatataactttacaaaataagtaagatgttaatttagaaatttgagaaattaatgctctaatactgagtttttatttaaaaattattttttcttcccctcaacaatgaagcaagcttagctgtcaagggaaactttttacaaatctgaaaaaaacaatctatgactttggtttaaggctcactgatacttttaggctaaattggttttaatatatttcttctattctaaaaacctgaactcagtcacttaaaggctatgaaatttaaaaaaaaagtcgatgtgaaagtttcttttgaacactaaaataaaatatgtgcagataaaa

SEQ ID NO: 300 - DNA, 1016 bp, Homo sapiens
gactccagccgcacctcctccggctctgcagtggcggcgaggaggcgagccggagcgacggcggggctggggccggagccgagccggggtcgggcagcagcagggaccccccagaggcggggcctgtgggaccgctatgggcgtggagatcgagaccatctcccccggagacggaaggacattccccaagaagggccaaacgtgtgtggtgcactacacaggaatgctccaaaatgggaagaagtttgattcatccagagacagaaacaaacctttcaagttcagaattggcaaacaggaagtcatcaaaggttttgaagagggtgcagcccagctgggtcctctttctcctctccccatctgcccccatccctgctagatgagcttggggcagagggcgaagctgacctgcacccctgatgtggcatatggagccacgggccaccccggtgtcatccctcccaatgccaccctcatctttgacgtggagctgctcaacttagagtgaaggcaggaaggaactcaaggtggctggagatggctgctgctcaccctcctagcctgctctgccactgggacggctcctgcttttggggctcttgatcagtgtgctaacctcactgcctcatggcatcatccattctctctgcccaagttgctctgtatgtgttcgtcagtgttcatgcgaattcttgcttgaggaaacttcggttgcagattgaagcatttcaggttgtgcattttgtgtgatgcatgtagtagcctttcctgatgacagaacacagatctcttgttcgcacaatctacactgccttaccttcacttaaaccacacacacaaggtgctcagacatgaaatgtacatggcgtaccgtacacagagggacttgagccagttacctttgctgtcactttctctcttataaattctgttagctgctcacttaaacaatgtcctctttgagaaaatgtaaaataaaggctctgtgcttgacaaaaaaaaaaaaaaaaaaaaaa

SEQ ID NO: 301 - DNA, 4797 bp, Homo sapiens
gtcgcagccccggaggagcgcgcgagcagcccgggatggtgcgcgctgccccgacagccgccgccccggcgccccgagccgccgccccgtgctccggggacagggctccccgcgccccgcgcagctgagcgctgccgccgccgcagcagacaggatctctctcagttacccaggccggagtgcagtggcgtgatcctagctcactgcagccttgaacccctgggctcaagtgattctcctgccttggcctcctgaatagctagaactacagatcaacagtacaaattctgaagtttgtaaacttgctgatggtggtggtaagccatggcagatgataaagttgctatcttaacggatgatgaagaggaacagaagagaaagtatgtgcttgcagatccctttaatggtatttccagggaaccagaaccaccttcgaatgaaacaccttcctccacagaaacatctgctattcctgaggaggaaatagactggatagagaaacattgtgttaagataaacaacgatcttctaatttccaaggtcttttattttttcttttactctgcctatggctctctctatccccttttgcctgtgtattacaaacagctgggaatgtctccaagccagagtggactactagtaggtattcgttacttcattgaattctgcagtgcccccttttggggtgtagttgcagaccgctttaaaaaaggcaaaattgtcctcctcttttctcttttgtgttgggttttattcaacctgggcattggatttgtcaaacctgctaccttgagatgtgtaccaaagattcgcccaacaactcaccccaccaatgcaagtcaccagttaactatcctgccaacaaattcttcctttacctctttcctcaccatatcaccaaaaatgcgtgagaaaagaaaccttttggaaacaaggctcaatgtctcagacaccgttactttgccaacagctccaaacatgaacagtgaacccactctgcagccccagacaggtgaaattactaaccgtatgatggacttgactttgaactcaagcacagcaacccctgtctccccaggaagcgtaaccaaggagacaaccactgttattgttaccaccaccaaatctttaccttctgaccaagtcatgcttgtttatgatcaacaagaagttgaagctatattcttggtgatcttggtagttgtcataataggagaatttttcagtgcctcttctgtcacaatcgtagacacggtcacactccagtatctgggaaaacacagagatcgctatgggttgcagcgcatgtggggctccctgggctggggcctggcgatgctgtctgtgggcatcgggatcgactacacccacatcgaagtgctcatcgatggaaaggggtgtaagccccccgagtacaggaattaccagatcgtcttcatcgtcttcggcgttctcatgaccatggccttgatcgttgccactcagttccggttccgctacaaccatttcaaaaacgatgattctaaagggaaagaggtggagatcccgcaggtggaaaggaacaactctacagagtcctctgaggagacaccaaccaccacaagccactcgcaggccttcaacttttgggacttaatcaagctgctctgcagcgtgcagtatggctcagtgctgtttgtggcttggttcatgggttttggatatggcttcgtgttcacctttctctactggcatttggaagacctcaatggaactacaaccctctttggggtctgttcagtcctgagtcatgtgtctgagctgacagcatatttttttagtcacaagcttattgaattgatcggccacatcagggttctgtacattggcctggcctgcaatacggctcgctatatttatatttcctacctggagaatgcctggactgttctccccatggaagttcttcaaggagtgacacacgcggccatctgggcagcatgcatttcttacctcagtgcagccgttccccctgagctgaggacatctgctcagggcatcctgcagggccttcacctgggtttgggaagaggatgtggtgccatgatcggaggcgtgttagtcaattattttggggctgctgcaaccttccgaggaattggcatggcctgcttggtgatcctactgctctttgccctgatccagtggctggcagtgccagatgaggaagaagacaagacaatgttggcagaaagaattcctgttccctccagtcccgttcctatagcaaccatcgacttggtacagcaacagacagaagatgtcatgccacgcattgagcccagacttccacccaagaaaactaagcaccaggaagaacaggaagatgtgaacaaaccagcctggggagtcagctcttctccctgggtgacctttgtctatgcactctaccaaattaaagagatgatgcaactcacaagagacaaccgtgcttctgagatacagcctttacaggggaccaatgagaatagggaaaattctcctgctggtagagcccagcctgtcccatgtgagactcactctgacccatctagaaaccagccatcccctgacgcagcagcatctcagacgcagaccagccccgctcaccccagtgtggacccgtgcacagaggagagtgaagagcagcaggctcagctggccgcgggaggacactgagggcatcctgctcatctcacaccctgcatggaatcaggctcctcagccaggacacagggtgaggccccccagccaggatatgcctcccctggaggagcacagcactgcatatgcttctaaatatctaaactcattaacatggaaacacacacacaggagctacagtacatattggcaggaaaaggtaaactttcgtaatctcattggaattacaacagggaaatggagttcaatgaggactttcagttctttgcttggttaggttaaggatgatagaatttctctgccagtgcagtaagagttgaaaccggcagttacactaagtaagtggagggaatgaaagtgtttcgaggtgaatgtggatataatttccctcttctgattatttattcttatttggttcctaacacaaactgggaagagatagaattcatctatactttcttttttcttggagagaaccgtttaaaaaattacaagatatatttaaaaagtaaccagataaaagtagcacatgtgcttttgttaaaaataaagttaaaagttaaagttaaaaaatgaagttaaaagtttcatcagaaactttacatatctttagcaaatatatttttatatgtgtatggcatataatggaaataattctttgagcaacagaagctattattaactactgcaagctaagccgagcttaaaaatgccttttgttttaaatgggctttgagaaaaaaaacagaaacaagcgattatttcaaatcaaccaaccaactcagtatcctgtgttttgatagacaagagtttactaaatatattgatactgtaaatagcctctctcgctatttactatcttatagtaattcaggctctaattagctgagggaatgaaacacacaaaaatcactgaattcctaagagttccttaaataagcagtactagttacaaatcacagtataagatttaagtgcctgggggaaggatacaatttttagaaattacatattgggtcagttttgttttgtttttggtgaggaaaaggtggtaaataggaaaccatgaatgggaaggatggcaataagtagcaactatactttccaatgactaaagaaagaaaatctcagtatattcgttctcatgaagacacagtcagacactggacaatgtaatgtatgcaactgcaaacgttacaactgcagccagaacaatggctgggtggatcgcacgtaaagcttgccactaaaaatcaaagcagaggttaacaggaaacctggggggagtgtggaaaagggaaaactgttttagctgaataaaggtgaattatataatttataatagctgtggatgagcacaggagagagaggaaagaaaagaacagtcgaaatgagcaactcaccttaccctctgaccctgattagacaggatcaattgtaaagtgagggcttctccatgacaccatagttctgcccaatactgcatttgggataagaaattctacacttggatgtctcgcttcacaataaaacacagcttaaaaataaaataactgaaagaaatagaattcagcaaatagttattttttgcacttgaactgaaacgtactgtactgtaaattatgactcattttaagtgacctttaaaatcagatgtatttattatgcttgtgtaattatagaaataaagaaatgggtgacaggcttaacctcacctatgaatgtacagtatgtggatttgtgaaactgactgtaggaagtcaaaaacttgtactgtatcttgtgtttacagttctgatttattcctttgaaaagcctgctgttttggaaatgcacagttgacatgttgaaataaaaatgaataccatttttaaatgtttcttaaatgataaagatgtgaccaaacaaaagtcctatactctaatgaatgagaccaaattcaacatgcctttgttatggaacatttactgtgacagcagaatcgataatgcagtcatttccagccttgtgagctgacaccttcatgggtttgtggactttgtgactttttcttcctgtccccaaagtgccatatgctaccttaaaaaatattaaagtgaattcaaattacat

SEQ ID NO: 302 - DNA, 6500 bp, Homo sapiens
aaaaccaggaggggaagctgagtggcttctggaataaactttgggtgtgagacgggattcaggctgtggctaatgtgctggaagcacgcacagttgtgaccatcaagtatgcaggaagcaatcattctcctggctctcctgggtgccatgtcagggggagaagcactacacctaatcctcttacctgctacaggcaatgtggcagagaattctccacctgggacttcagtgcacaagttttctgtgaagttatcagcatcattgtcacctgtgatcccaggatttccccagatagtcaactcaaatcccctcactgaagcttttagggtgaattggctgtcaggcacctactttgaggttgtcaccactgggatggaacaactagattttgaaacaggaccaaacatatttgatttgcagatttatgtgaaggatgaggttggtgtcacagacctgcaagtcctgactgtccaggtaacagatgtgaacgagccacctcagtttcaaggcaacttggcagaaggtctacacctctacatagtagaaagagcaaaccctggattcatttaccaggttgaggccttcgatccagaagacacaagccgaaacattcccctcagttatttcctgatttctcccccaaagagcttcagaatgtctgctaatggcaccctcttctccacaacagaattggactttgaagcaggacacagaagtttccatctcatcgtggaggtgagggacagtggaggcctcaaagcctccacagagctccaggtgaacatcgtgaacctcaacgacgaagtccctcgctttaccagcccgacacgagtgtacacagtcctggaggaactgagtccaggaaccatcgtggccaatatcacagcggaggatcctgatgatgaaggttttcccagccacctcctctacagcattaccactgttagcaaatatttcatgataaatcagttgactggtacaatccaagtggcccaaaggatagaccgagatgcaggtgaattgagacaaaatcccaccatttccctggaagttctagtgaaggacagaccatatgggggtcaggagaatcgcatccagataaccttcattgtggaagacgtcaacgacaatcctgccacatgccaaaagttcaccttcagcattatggtgccggaaagaacagccaaggggacgttgcttcttgacctaaacaagttctgctttgatgatgacagtgaggcaccaaacaacagattcaacttcaccatgccatctggagtggggagcggcagcagatttttacaggatccagctggctctgggaagattgtgctgattggtgatctagactacgaaaatccaagtaacctagcagccggcaataaatatacggtgataatccaggtgcaggatgtggcccccccttactataaaaataacgtctacgtttatatcctaacaagcccagaaaatgagtttcctctcatttttgataggccatcctatgtatttgatgtgtcagaaagaaggcccgccagaacccgagtgggacaggtgcgagccactgataaagacctcccccagagcagcctcctgtactccatctccactggaggggccagcctccagtatccaaatgtattttggattaatcccaagacaggagaactccagctggtaactaaagtggactgtgaaacaacccccatctatattctcagaatccaggccaccaacaacgaagacacaagctctgtcactgttactgtgaacatccttgaagaaaatgatgaaaagccaatttgtactccaaactcttatttcctggccctcccagtggatctgaaagttggcacaaatattcagaatttcaagctgacatgtaccgaccttgattccagccccagatctttccgttattccattggcccaggtaacgtcaacaatcatttcaccttctctcccaatgctggttccaatgtcacacgcctgctgcttacatctcgctttgactatgctggtgggtttgataagatctgggactacaagctacttgtctacgtaactgatgacaacttgatgtctgacaggaagaaagcggaggctcttgttgagacaggaacagtgacactgagtattaaagtcattccccacccaaccactatcatcaccacgacccccaggcccagggtcacctatcaggtcctgaggaaaaacgtttactctccatctgcatggtacgtgccgtttgtcatcactttgggctccatattgcttctgggtctcctcgtgtacctggtcgtcctattggccaaagccatccacagacactgcccctgcaagactgggaagaacaaggaacctctgacaaagaaaggagaaacgaagactgcagagagagacgtcgtggtggaaactatccagatgaacactatctttgatggagaagccatagatccagtgaccggggaaacatatgaattcaactcaaaaactggagccagaaagtggaaagatccactaacccaaatgccaaaatggaaagagtccagccaccagggagctgccccacgcagagtcactgctggggaagggatggggtcactgagaagtgccaactgggaagaagatgagctgagtggcaaagcgtgggctgaggatgctggtctgggttccagaaatgagggtggcaagctgggcaacccaaagaacagaaatccagccttcatgaacagggcttaccccaaaccacacccaggaaagtaaacggggtctaaggaggggcctgtcaatcactgagatgctgcctcaccctaaattctatggggatggtgtgggcatggtgtaggggggaaaatgtgggctgaggggattcagacatccagggtcaaacatgggatgtttgacaaatttttaaacaaatagaaaggggtttgatcacatagttgcgtgttctgaaatgatacaggaacattttctatcagatttcagaactacctgtgcttctgataagcaagactgttaactttggggtgtggaattgttgtgtttcttctttgcattgactgctaggaagctctattctgttcaccatagaaagtttgtaggaattcctgacataaatagtgaagactatccttacatctggtttccaccttattttcctgccctcgttttaacatcacccagatttcttcagttataaatatgccatacacctttgtaagtcacctcaaatcttcttcaaaagaagcagaacagtgaaaaaaacagatgagtaagttaagagttggtcatctggaaagaagaaaactcagtaggcaccttcttttgttttttcttgtggtgtccggatcagcatcctgcatgtgagattcatccacgttgtcctgtctagcagtagttcagttctcttcatggttatgtctggtttcattctatgattatatcacaatttatctattctacacttgggtggcagctgcttcagattttttacttttaaaaaatatacttaaaagtgaactacaggcagggcatgatggctcatgcctgtaatgccagcactttgccaaggtgggcagatcacctaaggtcaggagttcaagatcagcctggcctagatggcaaaaccctgtctctactaaaaaatacaaaaattagcttggtgtggtggtgggcacatgtaatcccagctacttgggaggctgaggtagggagaactgcttaaacctgagaggtggaggttacagtgagttgagattgtgccactgcactctagcctgggtgacaaagcaagactccatctcagaaaaaaaaaataaaagtgaattacaacactatgaactttcttgtacatgtcttttggtgaacataaacactcacttttttgctcatatatctaagagtgggattgctggagcaattgctggatctgccaaagagttccaaagtggtggctctgattcacattccagcagcaaacactgagagttgcaattgctctctatccttgccaacacttgggattgtcaatccttttaactttagccattctggttaaaattactattgaagtgaaatcactttttcctcaaagctgaaacaccatcagccttacaacctacctgccttgctccttcccacttcctatgattggaaggaactgcaggactctgagtggggacatactggaagccccatctagacataaaactcagacttccacctgtaggcatgagcaatgaactgggaataaatggtattatgatggaataggaaatgtaactttccaatgtgtgcctagcagagcctgagcaagcttcactcgagctctatgccctgctgcccagctgctgcgaccctagtccagtaaccctaagaaaggtccaggtgagtgttcattagggaagcactcccttcccaactggggagtcaggtgagagcctaccaggtccacaaggtcctgtgggagacagactggatccagcaaatgtagagcttcagagagagcagcagcttgtttactgtgtgcctagtgccagtgtcacttctcaagcaaaagaagcatttgcaaaatgcctgtcctggcctagattgagcgtgatttattaataagggttggttgccagggaactcccttgaatggatttaaactttgcaaaagaaggcagaactgttcatttatgcaggttaaagtgagtgaagtggctgattgcccatttaaggcattgcaaatctgtggggcccggagtcaaatgctttccttggaagctctcagcttcaatgcaagtaaaatgaggttctgagaaggctgaagggggacttaataactgcttataagcccattaagaatgattaaaagggccgggtgaggtggctcatgcctgtaatcccagcactctgggaggctgaggcaggtggatcacctgaggtcaggagtttgagaccagcctggccaacatggtgaaaccctgtctctactaaaaaatagaaaaattagctggacgtgttagcaggcacctgtaatcccagctactcaggaggctgaggcaagagaatcgcttgaacccaggaggcagaagttgcagtgggctgagattgcgccactgcactccagcctgggtgacaagggcaaaactctgtgtcaagaaaaaaaaaaaaaaaagaataattaaaaggagagagtggtgagcagctggtctttcttctccagtgatgacagggcaagagggaattgtgcttaatggccagagaagagatttaagtcaggcaccaagagggacttcctgaagcctggggcctctctgaagagctcagtgtcttctctggtgataggcaggaagagctgagtgtcttcctagtcgcaaggcaagcctcgagaaactcaagaaataggggcaagagtgcgccaggaggagagaacacctgctgccccgtttcttttgtatatccggctatttggttcggggaaatccagaagtcaaagtgtcaccggtggagggtcttgactgcaagttgtccaagttcttggagttttgaacaaagaatggaacaaaatgcccagcaaagcagagaaagaatgaggcaacgaaagaatgaaagcagggatttattgaaaaccaaagtacactccacagtgtgggaacgggcctgagcaagtgactcaagggcccagatacagtcttctcagtccaaataccccttggaggtttccccttggccacttcatgctcacctcatggaaatgaagtagtggaccacaattggtctgattggttgcaggaagcaaccaatcagagactgaagtggagttacaaaggtcacgctcctgtgcaaacatctgattggttgcaaaaagcaaccaatcagaggctaaggtgaagttacaacgttgcaacgaagactcggctggcaatcagtctgattggttacagacagccaatttcccagcgttgaccaggttttggggggaacaaaattatctgaataaaatgaagacagcaaccgtcgtggatttggtgaaagttttctcccatctccctctcaaggccttaaacaggtatgagttgattatagccaatgtttacttttctcattctgattcattataaaactggggtaaatacgttcaggaattagaccacgtaacaattataattgtcgaagactttgaaactgcatagtagattgtgacattggagctttttgttgtgctcattagaaagcagggtctgaaactcagcctgtgtagcaagcacgggtggctcacaagcagaactgggaaatgacacttctgctccccagagccccctttcacatctggggttctcattgtttgcctttttacttaatgtattttgtaatggctgtgaaaattaagctacaaaatgagtgaacattgaagacaatgattgctattgaaacttaggatttctcatttcaaacttagcgtgtgtttatccttcgtattcattcaataaatatctgtggagcaacta

SEQ ID NO: 303 - DNA, 3651 bp, Homo sapiens
ccagcatttcagcaagcggcggcagcacccgcggggaggcagagggtgcggggccgtgggggccgcggagctgccctgcccaactcagcccagactaggcggcagcccggaccggcgggacccgagggcctggccccagcgcccggtagatcgcggcggtcagcggtgagggccagcggcccaggccagcggctccagggccagccacgatgtcctccaccgtgaacaacggggcggccagcatgcagtccacacccgacgccgcgaacggcttcccgcagcccagctcctcctcggggacctggccgcgggcggaagaggagctgcgcgccgcggagccgggcctggtgaagcgcgcgcaccgcgagatcctggaccacgagcgcaagcggcgggtggagctcaagtgcatggagctgcaggagatgatggaggagcaggggtattcggaggaggagattcggcagaaagtggggacattccggcagatgctgatggagaaggagggagtgctcaccagggaggaccggcctgggggccacattgtggcggagaccccgcggctgaccgagggcgctgagccgggcctggagtacgcgccctttgacgatgacgacggcccagtggactgtgactgcccggcctcctgctaccgcggccaccgcgggtacaggaccaagcattggtctagcagctcggcatcgccccctcccaagaaaaagaagaaaaagaaaggcggccaccggagaagccgcaaaaagaggagactggagtccgaatgcagctgtgggagctcctcacccctccgcaagaagaagaagagtgtgaagaagcatcgccgagacaggtctgattctgggtcccggaggaagagacggcacagatctcgaagctccaagtgcaaaagaaaagagaagaacaaagagaagaagaggcctcacacagagtccccaggccggaggtctcatcgccatagcagtggcagctcccacagcccctccctctcctcccactacagtgattccagatctcccagcaggctgagccccaagcaccgagacgaagggcgaaagacgggcagccagcggtccagcggaagccggtcgccttccccgtcgggcggcagcggatgggggtcgccccagcggaacggcggcagcgggcagcggagcggagcgcacgggggccgccccggctcggcgcacagcccgcccgataagcccagctcgccctcgcccagggtccgtgacaaggcggcggccgccgcacccacgccgcccgcgcgggggaaggagagcccgagcccgcgctcggcgccgtcgtcccaaggtcgcggaggccgcgcggcgggcggggcgggcaggcggcggcggcggcggcgtaggcggcggcgctcgcggtcctcggcgtccgcgccccgccgcaggggtcgccggcgcccccggcccgcgcccccccggggctcgtcgcgctcgctcagcagggcccgctccagcagcgactccggcagcggccgcggcgcccccggccccgggcccgagcccggctctgagcgaggccacggcggacacgggaaacgggccaaggagcggcccccgcgcgcgcggcccgccagcacctctccgtccccgggcgcgcacggccggcgcggcggcccagaagggaagagctcgtcgcgcagccccggcccgcacccccgctcctggagctccagccgctcgccctccaaatctcgctcgcgctctgcggagaagcggccccacagccccagccgctcgccgtcgcccaagaagcccctcagccgggacaaggacggcgagggccgcgcaaggcactctgaggccgaggccacccgcgcccggcgccgctcccgcagctactcgcccatccgcaagcggcgccgggactcgccaagcttcatggagccgcggcgcatcaccagcgcccgcaagcgtcctattccatactaccggcccagcccctcttcctcctccagctgcttgagcagcgactactcgacccggagccacagccgcagccccagccccggccacagccacgggagctacagcagtcgcagccatgggacccgcagccggacacgcagcccctcgaggacccccagtcccagctaccacagccggagcagctctgagagcgggggcttctgagcccagacagactcagcttggtgcccccctggcactgggagaggcgaggggcgggccccaggaccccagtggggagggggctatatctccttgcccccaaggctacaaagaggtctcagggccagtgcacgggcagatgggaccggggaagactttgagggtgggcatccagtggacaaggagaagccagatgtgctgcttctacgggtgtcctctcccacctcctgtccacccactgtgcccggggaacaaagagccgttacgaacacaggaatctccccatcccccttcctgctgatgccaactcaccaggcttgggactgctgccggtggatggtaccagagtccatgatctgctctgtcacttcaccttagctcagtgcagccagggacaccttgcaaggtgccagccctgggagcccctcttccgcactacacagctccctccactcctctcttatcactgggcagacgaggaggtggtacagcacatgggtttggagctagacagaaggaagaacagcctaacccttggtgcacccccatccaagctggggagctgcatccttttgagctggctgcaggaggaccctggctgagggctggtggctggccccacagcctcccccaagctcctccactgacccaggagtgcccagacgggtggcccccaaaatcccagcctggggagctaggcacctcactcttggtctgacctctccaggccaggctctcctcaccccatgccctgggccaaggtcctaccagccatgactactgcatgacaagaggtggggggtacagacctcaggtacatttgaccctgaggttaaaaggggttcaggtcaagaggtgggagaggaaaggggtagatgggaggtggaatctgtaggaaagagaaaaagcaaagtcgttcactgactgagtagcccccagggagtggagacgggtccctggggagggagcagctgacaggtcagcagtgcccccagccccacccaagaggagggcagcgtgtgcctgtggtctgggacgtgggctggatggcagcccagggtcacaggcataggataacatgtgctttggacctgacaagggagtaccttgggggtctgatggggtcatggccagccgagcctctgtagagatggaggctacagccctcagaagggaggggaggaaagagactgagggccctggcctggggcgtcgatggggaagcggtggcccccagtcctcttctgctgctcccagccccctcctcctggggccctcagggatctcatgaagtcttccttggcccaaccaggcagatgccccgggctccagtggggggaggggtctggggtctggtccgggttccccgctttctctatgtcccccctccctctttctccgcagtgcggataaaaattggactcgaataaaacccttggtgcccggataaaaaaaaaaaaaaaaaaaaaaaaaaaaaaaaaaa

SEQ ID NO: 304 - DNA, 1479 bp, Homo sapiens
atggctgcgaagctgcgagcgcatcaggtggacgtggacccggacttcgcgccgcagagccggccgcgctcgtgtacctggcccctgccgcagcctgacttggccggcgacgaggacggagcgctgggcgcaggggtggccgagggcgccgaggactgcgggccggagcgccgggctacggccccggcgatggccccagcgccgcccctgggcgcggaggtcggaccgctgcggaaagcgaagagctctcggcggaacgcgtgggggaacctgtcctacgccgacctcatcaccaaagccatcgagagcgccccggacaagcggctcacgctctcgcagatctacgactggatggtccgttacgtgccctacttcaaggataaaggcgacagcaacagctcggccggctggaagaactccatccggcacaacctgtcgctgcacacccgtttcatccgcgtgcagaacgagggcaccggcaagagttcgtggtggatgctgaaccccgagggcggaaagacagggaagaccccgcggcgcagggccgtgtccatggacaacggggccaagttcctgcgcatcaagggcaaggcgagcaagaagaagcagctgcaggcgcccgagcgaagcccggacgacagctccccgagtgcgcccgccccggggccggtgcctgccgcagccaagtgggccgccagccccgcctcgcacgccagcgacgactacgaggcttgggccgacttccgcggcggcgggagacccctgctcggggaggcggccgagctggaggacgacgaggccctggaggccctggcgccatcatcgccgctcatgtacccaagccccgccagcgcgctgtcgccggcgctgggctcgcgctgtccgggtgagctgccccgcctggccgagctgggaggcccgctgggcctgcacggcggcggcggcgcggggctgcccgagggcctgctggacggcgcgcaggacgcgtacgggccgcggcccgcgcccaggcccggcccggtgctgggtgcgccgggggagctggcgctggcgggcgcagccgccgcctaccccggcaaaggggcggccccgtacgcgccgcccgcgccctcgcgcagtgccttagcccaccccatcagccttatgacgctgcccggcgaggcgggcgccgcgggcctggcaccgccgggccacgccgccgccttcgggggcccgcccggcggcctcctgctggacgctctgccggggccctacgctgccgccgccgccgggccgctgggcgccgcgcccgaccgcttcccggccgacctggacctcgacatgttcagcgggagcctcgagtgcgacgtggagtccatcatcctcaacgacttcatggacagcgacgaaatggacttcaacttcgattcggccctgcctccgccgccgccgggcctggccggggccccgccccccaaccagagctgggtgccgggctga

SEQ ID NO: 305 - DNA, 5009 bp, Homo sapiens
ccggcccggcccgcccggcccagccgctcctgctgggcgccccaaccgggtccggcccgggggggcgggggccgcggccgccgaggatggggaaatccaacagcaagttgaagcccgaagttgtggaggagctgaccaggaagacctactttaccgagaaggaggtccagcagtggtacaaaggcttcatcaaggactgccccagtgggcagctggatgcggcaggcttccagaagatctacaagcaattcttcccgttcggagaccccaccaagtttgccacatttgttttcaacgtctttgatgaaaacaaggacgggcgaattgagttctccgagttcatccaggcgctgtcggtgacctcacggggaaccctggatgagaagctacggtgggccttcaagctctacgacttggacaatgatggctacatcaccaggaatgagatgctggacattgtggatgccatttaccagatggtggggaataccgtggagctcccagaggaggagaacactcctgagaagagggtggaccggatctttgccatgatggataagaatgccgacgggaagctgaccctgcaggagttccaggagggttccaaggcagacccgtccattgtgcaggcgctgtccctctacgacgggctggtatagtcccaggctggagctggatgcctgggaaccactcacctccttctgtgccatgaggccacctcagccctgacaccaaccccgtgcgtccacccagccttcttccgcatccacacacagccggctgcccttgacccgggaggccccggctctcctctcccctgtcctgcacccatcccccgcctgaagccaccggctccaattgccagcaacctctgcttgtccggaaaacgacaacacgaaatggaaaaggctacagccctctgcataaaccaaggacttggctgcctcgcaggcagcctccgttcctcccgctctcttgcgcgtgtgcttttgttttttattttgaacagacgttttaaaagaaaaaaaaacaactaccttctgtcctagaagacacagactgacagatggggtgaaggcctggggacctcagagaactctgccttgccctcgtccctcgtccttcggcagccggagaggctgtgggtgggccgagggtgtctaggggttctgcctggtcaacgttatttgtcgtcccatcttttggcagcaaaaccacctgcgtggctaggatgattaattatgaggatgatgattttttttgtgataacagtattgtgctttttgtggggaaagtgaggtttttttttatatacatatataattgatatctttaatttattggttgttaactgttgctgctgcctggtgtgtcctcagctcccagggctgcgggcccaccgtttacatgtgcacgccctgacccacctgcccacgccgacttgggaggatggtggcctgcagcggccaagaagccaaaaaaaattttttttttttcagatactgtgcttgatttttggagaggggagaggtggaaattcctaaatggctaatgcactgttccctccagcccgaatgcctcctgccaaaccccttttccctgctgcctctgtccccgcatccttgttctcccctgggtccgtaacattttttccgaggatgaacaggggacatctttaggtttctcaactcttgctttggtgtttgccgcagcatggaaaacagggcgcctaaggctgggagctggaagaaggggcattgggtacccaggcagagtcaggagaggtggtctttgaagtaagttagcagaaatcaaggggacccccgcctccttgggctggggaggggatttcaagatagttcatgactctctcccgctctgccttccctccttcctatctgctttttccagtaaactgcatggtgtccttccctggccttctcttggctcaaaggctgggagggagggaaggagagaagagttccaggcaatcccatcaatatagtccctacacctggggctgcggcccacatgtcttcacggaggcttccagcggtgcctgccactgaggcaggtgcggccccaggaccatcaccaggaatgcgaggccaccctggaccagaggtaggagcccaaggtccggcccttgctctttgattgtgggcagcctcctgccctctctgggtctcagttgccccatctgcagagcgaggaggcccgggctggttggtcttgaaggcccttttccatgccgacatcatgtcactctaggcctggggttcagtttcctgtggctggtgatgctgtggttaagtttgcttgaccccagcagcccgagggactgtctgagtcacagcacagcccctattgcgtggctgctggtgtgtggggtcagttccagcagatgaatgtgtcatgtggcacaccttgtcccttcccgcagcatttcctggttccccccagacccttgagcgctctttgggacccagaaggagtccttgcacagggaaggcttgaggtgagaagccgcttcccagactgtcagggccaggcctgggtctagaattcttgctgctgctttgcagagtcaacagcccatcagcccatgttttagaggggacactttggtcctcggttcccaccctcagcaagcaggcctccagcccgaggaaggcctctgccgtagtgacgttgccgtgtggggctgcgtggctgttccccttggctggagcattcagccaaccccagcgtcccccctgaggcgttcattggcagccccctaggactgcacgctggccccacggtaaccccccctcccccaccaacatcctgcagggatggggtcagtggttccaccttcacaggccactttgaagggtggattctttgaggcccctgccagtcggctccctgctcagctgctggcccgggcgacctgggactcagcaccaacggctgaagtttctcagctgggctctgacctggggtctggggcagggaacgaacatggtggctttgggctgagaggatgagggaggtctttcccaggtcaaattactttcctttggcctctgcctgaggctcgatttgcctctctggtccaatgggactgacactgttgtacaacctgacctgtggctgagggtgtctgggcttaagcatgtggaccccttcggtgtgtccggccttcctccatcgtcctgccctttggccttttggtttgaagccacaggtgtggcttctggccttagcagatggtatgcttgcggaccgcagcccagcatgccggtgggcccacagcccgagccagcccagagctgccggaagggccgcccttcccggccctggcggggtgctggacactggccattttcactagagtttgcctggcagggaccgatctctgccccctcctctccccaggcctctggctgcagtgatgccgcagaatcctgagccaggtgcctcctgagcagcccgtgcgcctctccacagcggcgtttgccacccaatgcggctcgcttcagatgctctgatgcagagggcacgcccatagtccctctgcagagcctcgcactggggccagggcaggcaccagccccaggcggccagtcggccacggcctgtcctcttcctcgtagcgtctgctcctcactttgtgttgatggtgacttaggagaatgttccgattttccatgatctaagcaggccacgtttaaaataacatcaaggcaagcgtacgtgtcaccctctgtactgacatctcttcccctgaaatgcttttcagtttgacagcccgtttcctagacaagtgcacctggggtttcaggaactttgtgttttttcggagggggttggtggggaggtcgggatgcctgggatcccttcctggagaggcaggctgtctctggaaaaagcctccattgcccacccgccaggcggaaagtcaccctgttcccagcgcggtttcagcatttaattttaagggagctaaggaagcgcggcgcgccccctggtggtggtaagccgccaacgcacctgggggctgcaaccccaccggacgggtggtccggagggaggctggagcggggaggcgaggagggggctgtgagtcctcagaggccctgggccaccacatttctggcagcgtttcccagacacccctctgctaggccatccctggatagcaagtgaattaacttaagggcactgtgatgggaagccttgcccccctcttttttttttttttttaatatctgcggaataaacccaatggttaatttttgaatgaataaaaggcttttgttgaataaacagctggtcccatcttctgtcttggcatcttagcatccaggctcaggctctgccccttctccaggatggggtagccccgagtcgccctccccagtctgcacattccctgttgtccctgttcctgcagtggctcccggccccagggaggcccacctcactcccagcctgactcggtggctggcttccttcaggactttgcgcaagtcagttctgctcattgggtctcaatttccccatcccttggatgggagcaagagtctctgctgggcctgcctcgcaggggcctggtgagacccaaatgtgagtgtcatcatcaaagcccctcacagaagtggaggacggtgcccaagagtagcggtttggactgctgctgcctcccacccggagcctgccacttgggggagaaattggtataatgcttgcaaaaacaaacaaacaaaaggcaatgtcttctggttgtggttatttcctttcctgcttgcctccccagccccctttgagtctctttttggggtgccgtcctgtctgaacctgccggtgtgtgtctctggggccagggtcagggcgaggcccaggggtggacaggggccgtgtagcatgccccagcctccccaagctcctgctgtatgtcgtccatgtcacgccaattaaacacgcttcctggacttgtcctcgccaaaaaaaaaaaaaaaaaa

SEQ ID NO: 306 - DNA, 1031 bp, Homo sapiens
cgacagccggaagtcccgcctgccgtgtagtcgccgccgtcgctgccgctgccgctgccgccgtcgttgttgttgtgctcggtgcgctgagctccgcggctccgcgagccggttccgtccccttcccgccgccgccatgaagtggatgttcaaggaggaccactcgctggaacacagatgcgtggagtccgcgaagattcgagcgaaatatcccgacagggttccggtgattgtggaaaaggtctcaggctctcagattgttgacattgacaaacggaagtacttggttccatctgatatcactgtggctcagttcatgtggatcatcaggaaaaggatccagcttccttctgaaaaggcgatcttcctgtttgtggataagacagtcccacagtccagcctaactatgggacagctttacgagaaggaaaaagatgaagatggattcttatatgtggcctacagcggagagaacacttttggcttctgagggccattgctgggctaggtgcaccgtaactgcttgtgtatcttgtaaatagccagccattttcagttattataccagaacctcttcacatagacctattagtgcatttgtaactggatttatttcttaatatattggaaggttttgtttccttagactagtaaattatcatacagagttttattttgagtttttctttttgtgcattgtcctcatgcctgtattctccaggaaacttgtccttctggaaatcatattgaatgatatttctatatcgaagtgaggtaggtgcggtattaaagtgaaagggaaggtgatgcatttattctgggttatgcttgaagtgttagatggctaagtattaaaattatccaaattaaatccttagcagtcagaacacttgcttcactagaatatgccaactgccaatcatgttggactgagctaatttgttcctctttctgaaactattaaggtaaataattaacaataaaaattctcttataaaggcaaaaaaaaaaaaaaaaaaaaaaaaaaaaaa

SEQ ID NO: 307 - DNA, 2505 bp, Homo sapiens
attcttcctgggccgcagcaccggccgccggcccgccccgcccgccccgccccgcgcctctctagactctcggcgagcagcgtcgcccgcggagccgcgctggtgctgtggcccgggccctggcagccctcccgggaggcgagccggggaggcggtggcccctgccggttgcggcggggcgcgggaagaggcgggactctttgacgcggcggaggggtcgggcgacggccgacgcgccgccatctttggtccagtgcggtggcggcggcggcggtggcggcggcgactgctgcggtgaaggaggaggaggagccgagcgggcgctggcaccgaggcctgaccatggacgaggaatacgatgtgatcgtgctggggaccggtctcaccgaatgcatcctgtcgggcatcatgtctgtgaacgggaagaaggtgctgcacatggaccggaacccctactacgggggcgagagctcctccatcacacccctggaggagctgtataagcgttttcagttgctggaggggccccctgagtcgatgggccgaggccgagactggaatgttgacctgattcccaaattcctcatggctaacgggcagctggtaaagatgctactgtatacagaggtgactcgctacctggacttcaaggtggtggagggcagctttgtctacaaggggggcaagatctacaaagtgccgtccactgagactgaggccttggcttccaatctgatgggcatgtttgagaaacggcgcttccgcaagttcctggtgtttgtggcaaacttcgatgagaatgaccccaagacctttgagggcgttgacccccagactaccagcatgcgtgacgtctaccggaagtttgatctgggccaggatgtcatcgatttcactggccatgccctggcgctctaccgcactgatgactacctggaccagccctgccttgagaccgtcaaccgcatcaagttgtacagtgagtccctggcccggtatggcaagagcccatatttatacccgctctacggcttgggcgagctgccccagggttttgcaagattgagtgccatctatggggggacatatatgctgaacaaacctgtggatgacatcatcatggagaacggcaaggtggtgggcgtgaagtctgagggagaggtggcccgctgcaagcagctgatctgtgaccccagctacatcccggaccgtgtgcggaaggctggccaggttatccgcatcatctgtatccttagccaccccatcaagaacaccaacgacgccaactcctgccaaataatcatcccccagaaccaggtcaacaggaagtcagacatctacgtgtgcatgatctcctatgcacacaacgtggcggcccagggcaagtacatagctattgccagcactactgtggagaccacggaccctgaaaaggaggtggagccggctctggagctgttggagcccattgaccagaagtttgtggctatcagtgacttgtatgagcccattgatgatggttgtgagagccaggtgttctgttcctgctcctacgatgccaccacacactttgagacaacctgcaacgacatcaaagacatctacaaacgcatggctggcacggcctttgactttgagaacatgaagcgcaaacagaacgacgtctttggagaagctgagcagtgattgtggccgcccccagcccctgctgccccagcctgtgtctgttctcctcgagggctccagcatcctctgcttcccccaccacgttcccatcacccacctcattgatccactgaccaaatccttaaccctagcgatggcttgggagatggggggttggatagcatcctctttcttggcccttccttatcctaggaaaagagggttcctctccttgtgtgtgtctcttccccccacccctaattcttctgctctgtttgggaagacgtggaggaaaaggtgacttctgcccccaccgctcttacccccactgtagtggcctttggagatgcccccacctcccccccaccaactctcgcgtgttggagagaaggggccctcccagcacaaagttgcattcctcccccctaatttattctaatttattaactttgacccaccctttctgagcctgcagccttcccgtgtggcctgagggctgtcgagtgagctgccccagcccctcccagcccttgcccagcctgggggagtggggaaggcttgggcatggccccgttggaggttgatttgctgttttgtttcttgtctttgtgttctgtggtacttgctgagagaaaagaaaagtgagccaagcagaaggaggtgggaaaacggacccaaaccccagtgtgccctgccccatgcctttcctttagtggtgggaaacccttatcttgcaaagtgaatgtgtccccttccccaccctctagtgtatttcacagaaaacaaaacctcccaataaaacggttgaaacctgaaaaaaaaaaaaaaaaaaaaaaaaaa

SEQ ID NO: 308 - DNA, 2581 bp, Homo sapiens
ctcgcctcagtctcctctgtcctctcccaggcaagaggaccggcggaggcacctctctcgagtcttaggctgcggaatctaagactcagcgagaggagcccgggaggagacagaactttccccttttttcccatcccttcttcttgctcagagaggcaagcaaggcgcggagctttagaaagttcttaagtggtcaggaaggtaggtgcttccctttttctcctcacaaggaggtgaggctgggacctccgggccagcttctcacctcatagggtgtacctttcccggctccagcagccaatgtgcttcggagccactctctgcagagccagagggcaggccggcttctcggtgtgtgcctaagaggatggatcggaggtcccgggctcagcagtggcgccgagctcgccataattacaacgacctgtgcccgcccataggccgccgggcagccaccgcgctcctctggctctcctgctccatcgcgctcctccgcgcccttgccacctccaacgcccgtgcccagcagcgcgcggctgcccaacagcgccggagcttccttaacgcccaccaccgctccggcgcccaggtattccctgagtcccccgaatcggaatctgaccacgagcacgaggaggcagaccttgagctgtccctccccgagtgcctagagtacgaggaagagttcgactacgagaccgagagcgagaccgagtccgaaatcgagtccgagaccgacttcgagaccgagcctgagaccgcccccaccactgagcccgagaccgagcctgaagacgatcgcggcccggtggtgcccaagcactccaccttcggccagtccctcacccagcgtctgcacgctctcaagttgcgaagccccgacgcctccccaagtcgcgcgccgcccagcactcaggagccccagagccccagggaaggggaggagctcaagcccgaggacaaagatccaagggaccccgaagagtcgaaggagcccaaggaggagaagcagcggcgtcgctgcaagccaaagaagcccacccgccgtgacgcgtccccggagtccccttccaaaaagggacccatccccatccggcgtcactaatggaggacgccgtccagattctccttgttttcatggattcaggtgctggagaatctggtaaaagcaccattgtgaagcagatgaggatcctgcatgttaatgggtttaatggagagggcggcgaagaggacccgcaggctgcaaggagcaacagcgatggcagtgagaaggcaaccaaagtgcaggacatcaaaaacaacctgaaagaggcgattgaaaccattgtggccgccatgagcaacctggtgccccccgtggagctggccaaccccgagaaccagttcagagtggactacatcctgagtgtgatgaacgtgcctgactttgacttccctcccgaattctatgagcatgccaaggctctgtgggaggatgaaggagtgcgtgcctgctacgaacgctccaacgagtaccagctgattgactgtgcccagtacttcctggacaagatcgacgtgatcaagcaggctgactatgtgccgagcgatcaggacctgcttcgctgccgtgtcctgacttctggaatctttgagaccaagttccaggtggacaaagtcaacttccacatgtttgacgtgggtggccagcgcgatgaacgccgcaagtggatccagtgcttcaacgatgtgactgccatcatcttcgtggtggccagcagcagctacaacatggtcatccgggaggacaaccagaccaaccgcctgcaggaggctctgaacctcttcaagagcatctggaacaacagatggctgcgcaccatctctgtgatcctgttcctcaacaagcaagatctgctcgctgagaaagtccttgctgggaaatcgaagattgaggactactttccagaatttgctcgctacactactcctgaggatgctactcccgagcccggagaggacccacgcgtgacccgggccaagtacttcattcgagatgagtttctgaggatcagcactgccagtggagatgggcgtcactactgctaccctcatttcacctgcgctgtggacactgagaacatccgccgtgtgttcaacgactgccgtgacatcattcagcgcatgcaccttcgtcagtacgagctgctctaagaagggaacccccaaatttaattaaagccttaagcacaattaattaaaagtgaaacgtaattgtacaagcagttaatcacccaccatagggcatgattaacaaagcaacctttcccttcccccgagtgattttgcgaaacccccttttcccttcagcttgcttagatgttccaaatttagaaagcttaaggcggcctacagaaaaaggaaaaaaggccacaaaagttccctctcactttcagtaaaaataaataaaacagcagcagcaaacaaataaaatgaaataaaagaaacaaatgaaataaatattgtgttgtgcagcattaaaaaaaatcaaaataaaaattaaatgtgagcaaagaatgaaaaaaaaaaaaaaaaaaaa

SEQ ID NO: 309 - DNA, 2981 bp, Homo sapiens
gcattactcatactcagcggacaaaggatcactcagcattcaatctcaccacttcaaaacattacagagggaaaacgacacctagaagtaggagtgagattcgctgaagttcccttctgaggaagacccacccctccgcctggagagccggggctggcggtgcctgaggaccccttcggcctggacagcccacgcgggcttggggggcctcgctctgccctcatggggcggccatcggttcccgaagcggcgagtgaaaattcaaatggccagtagggggcgcactcggaagtggccgccccgcatgaggcagttcagcggccccgagagtccggggagggaggtttattctccgcctgcacgagactgtgaaatccgcaaccatgagcaggagaggcggccctggtggggaagaggccaccaacatctggacggcagccctgctcaggcattcggcaggtccagcagaggtacacctcctgcagcgggttccaagtgcacctccagcctgatgggcctgaccaaggaggcttccaggagcacagaaggggctgcaacccaggtacccagagagtgagcagctccacgcgggactgtgcacggtggccgacacccgcagggacgcccgccggacgagcacgcggagggccctcgcctccacggatgcaccatgccggtgtgaggagcatctgttcttcccactctctgcagttaacaaacccaacccaaaccaccacaggtgctcctcctggggagtttcctgtctgacaaatgccaggctcacttcaaggagaatcacgcttctttctaaagatggattcaccatttaaaacagagctctgggagcctttcggcaaatcttgaaagctgcacggtgcagagacatggatgtgacttcccaagcccggggcgtgggcctggagatgtacccaggcaccgcgcagcctgcggcccccaacaccacctcccccgagctcaacctgtcccacccgctcctgggcaccgccctggccaatgggacaggtgagctctcggagcaccagcagtacgtgatcggcctgttcctctcgtgcctctacaccatcttcctcttccccatcggctttgtgggcaacatcctgatcctggtggtgaacatcagcttccgcgagaagatgaccatccccgacctgtacttcatcaacctggcggtggcggacctcatcctggtggccgactccctcattgaggtgttcaacctgcacgagcggtactacgacatcgccgtcctgtgcaccttcatgtcgctcttcctgcaggtcaacatgtacagcagcgtcttcttcctcacctggatgagcttcgaccgctacatcgccctggccagggccatgcgctgcagcctgttccgcaccaagcaccacgcccggctgagctgtggcctcatctggatggcatccgtgtcagccacgctggtgcccttcaccgccgtgcacctgcagcacaccgacgaggcctgcttctgtttcgcggatgtccgggaggtgcagtggctcgaggtcacgctgggcttcatcgtgcccttcgccatcatcggcctgtgctactccctcattgtccgggtgctggtcagggcgcaccggcaccgtgggctgcggccccggcggcagaaggcgctccgcatgatcctcgcggtggtgctggtcttcttcgtctgctggctgccggagaacgtcttcatcagcgtgcacctcctgcagcggacgcagcctggggccgctccctgcaagcagtctttccgccatgcccaccccctcacgggccacattgtcaacctcgccgccttctccaacagctgcctaaaccccctcatctacagctttctcggggagaccttcagggacaagctgaggctgtacattgagcagaaaacaaatttgccggccctgaaccgcttctgtcacgctgccctgaaggccgtcattccagacagcaccgagcagtcggatgtgaggttcagcagtgccgtgtagacagccttggccgcataggcccagccagggtgtgactcgggagctgcacacacctgggtggacacaaggcacggccacgtcatgtctctaaactgcggtcagatgtggcttctggctcctcggggcctcgcgagggtcacgcttgcctggtcaccctggggctgcttaggaaacctcacgactggtcaccttgcactcctcacacagaattgctacaatcccaaagcgctcgccccgcagggtccaaaggccagcggtgaccagcctgtcacccagctcctccccgccaaccctgcctgccgctgcacctgcctgccgctgcaggaaacatttctgacaccgtcgaccaggaaagccacacggagaggccactgtgggtgaagcgcctcagttacacaggaaccctaaagcaaatctgccaccgtgggggaactgacgctggagatgcaaggtgctggtgggtctgagctggacgtcgcggtgtgtcctctgtgcccacggtctgagctagctagcgcaccgccgagttaaagaggagaaggaaaacatgctgctctggtgcacgcctgagcgtcctccatcttccaggatggcagcaatggcgctgtgcggcctcaccaggcccacgaggagcagcagcgctcggcccggagcagcaggaaggcccctctgtggagcgcccgccgtctgctccggggtggttcagtcactgcttgttgacatcaacatggcaattgcactcatgtggactgggaccgtgcgagctgccgtgtgggttagtcgggtgccaggacaatgaaatactccagcacctgtggctgacgaatttgtttctacagaaataacagctggggacaactgcggtgatgatgtaaaaaccttcccataaaatgtaagaaaagctgatgaggctggtgacgttcagcctttgtcaataaacctgtcatgtgcggatccttaaaaaaaaaa

SEQ ID NO: 310 - DNA, 4208 bp, Homo sapiens
acggcggcgccgagtctgcgggtcctcccgccagcccggccggaggcagccgaggccgctcgggcggcggcggcggcggcggcgggagccggagcgcatctcgcccaggagccggagcagcggcactgcctgaaccagacagcagccttgggtgcaggcgtggtcatgagggcagatggacactgctgaagacccggcctggctccagctgcttcaaaaggattccagccccccaggaccccgacccacagccttcttctgcccacaggatgggagcctgggggctggcagctcggctatgagggattactgcccctcccagcaaaaggcaagccctgcaccccccaggcacacccctgaccaaagcccaggcatggagtctagacacagaagccccagtggggctggggaaggggcctcctgctctgacggccccagagggagcctggcctgcccctccccaacctgcttctctccccaggagtcaccctccaaggagacattggaggcacatggagcctccatctcagggacaccagaagccaccacgtctgggaagccagagcctgtgtcctccgtgaaaactgagcccaaatcctcagatgacagaaatcccatgttcttagagaagatggatttcaagtcctcaaagcaggccgattccacttccataggaaaggaggatcctgggtcctcacggaaggcagatcccatgtttacaggaaaggcagagcctgaaatcttgggaaagggggatcctgtggctcctggaaggatggatcccatgactgtaagaaaggaagatcttggatccctgggaaaagtagatcctttgtgctccagcaagacgtatacagtgtcaccgaggaaggaggatcctgggtctttgagaaaggtggatcctgtgtcctcagacaaagtggaccctgtattcccaagaaaggaggagcccaggtattcaggaaaagagcatcctgtgtcctcagaaaaggtcgctcctacatctgcagaaaaggtagatcttgtattgtcgggaaagagagatcctgggccctcgggaaaggcagatcccatgcccttggaaagcatggattctgcgtccacaggaaagacagagccggggctcctgggcaagctgattccaggctcatcaggcaagaatgggcctgtatcctctgggaccggggctcctgggtccttgggaaggctggatcccacatgcttggggatggcagatcccgcatctgtgggaaatgtagaaactgtgcctgccacaaaagaggactcccggttcctgggaaagatggaccctgcctcctcaggagaggggcgtcctgtgtctggccacacggatactacggcttcagcaaagacagatctcacatctttgaaaaatgtggatcccatgtcttcaggcaaggtggatccagtttctctgggaaagatggaccccatgtgctcaggaaagccagagctcttgtctcctggacaggcagagcgtgtgtctgtgggaaaggcaggaactgtatccccaggaaaagaggacccggtgtcctccagaagggaggaccccatatctgctggaagtagaaagacatcatctgaaaaagtgaatcctgagtcttcaggaaagacaaaccctgtgtcttcaggtccaggcgatcccaggtccttggggacagcaggtcccccatctgcagtaaaggctgagccagcgacggggggaaaaggagatcccctgtcctcggagaaggcaggtctggtggcctctggaaaggcggctcccacagcctcagggaaggccgagcccctcgcggtgggcaaggaggaccctgtgagcaagggaaaggcagacgctggcccctctggacaaggggactctgtgtctataggtaaagtggtctcaactccaggaaaaacagtcccggtgccctcggggaaggtggatcccgtgtccctgggaaaagcagaagctatcccagagggaaaagtgggttctctgcctctagagaaggggagtcctgttaccaccacaaaggcggatcccagggcctcggggaaagcacagccgcagtctggtggcaaagcagaaacaaagctccctgggcaagagggcgctgcagcaccaggggaagcaggggctgtgtgtttgaaaaaggagacaccacaggcctcagagaaggtggatcctggatcctgcagaaaagcagagccccttgcctcagggaagggagagcctgtgtccctggggaaagccgactctgcaccttccagaaaaacggagtccccatccttggggaaggtggtccccctgagtctggagaagaccaagccgtcctcctcctccaggcagttagaccgcaaagccctcggctcagcccggtctcccgagggtgccaggggcagtgaaggccgcgtggagccgaaggccgagcccgtgtccagcaccgaggcctccagtctcggccagaaagacctggaagccgctggggccgagagaagcccctgcccagaggccgcagcgcccccgccggggccgcggactcgcgacaacttcaccaaggcgccgtcgtgggaggcgagcgccccgccgccgccgcgcgaggacgcgggcactcaggcgggcgcgcaggcctgcgtctcagtggccgtgagccccatgtctccgcaggacggcgctgggggctcggccttcagcttccaggcggcgccgcgcgcgcccagcccgccctcgcgccgagatgcgggcctgcaggtgtcgctgggcgccgccgagacgcgctccgtggccactgggcccatgacacctcaagccgccgcgccgcccgccttccccgaagtgcgggtgcggcccggctcagcgctggcggccgctgtagcgcccccggagccggctgagcccgtgcgagacgtgagctgggacgagaagggcatgacgtgggaggtatacggcgccgccatggaggtggaggtgctgggcatggccatccagaagcatctggagcgacagatcgaggagcacggccgccaaggggcgcccgcgccgccgcccgccgcccgtgccggccccggccgttcgggctcggtgcgcaccgcgcccccagatggcgccgccaagcgtccgcccggcctgttccgcgcgctgctgcagagtgtgcgccggccgcggtgctgctcgcgggcgggacccacggccgagtgatctgcccccattttgtacgcccgagtttccgaccttctcaggctcccttcttgatcacaggcccctagaaggggtcccctctgcgtgccacaggcctccgaggggttgtgcagcctctagggctgttgcgtccccgtctttccagcccctcccatcacaaatacagaagaaccccttctaccaagctccctcgtggccacgaggccacgaacccggccagccctgacgccccactgtcccctcacagccctcagctctactcccggtcacactgggcgaccacgggggcctgctcagcaccctcacctcccaccccctgagagctggggcaggctcctgagatgtctagactggtgcgttgtggtctccggtggggccagatccccagaacagggagagactgcatacaagtctgagtggcagaagcttcaagtgggtgaggatcggtgtgtgagacccgcgagtgggcacgtctctgaatgtgaggtctcgggcagcacgtgaggtagaacgagtgtgagcgtctccacgcagtggctggccccgtggccggggcgtctcttgcatgctgttggtggtccttccccagttcctatctcccacccgcctggttccagccccatcccctctcccactgagtcacaggtttgagattcccagagaggccaaagacagctacaggaagtaccctgggggctcagctgagagagagtcacagaaaggccagagggtctcaggaaggtctggaggtcacagctgggctcacagaagctcttgggccctggcatcctgggtgaccggtgttcttgggtattggggacaggacagagagctcattctataaccacagttgtcttttaaaggccaccctctccagccccttgtcccccctgtgctgtgagcccaagtcccttgtgaccactcagtgtcccgtccccacccctccagccgcagtttttggctacaaactgtcacagtatacattggtaataaaatatttccccaa

SEQ ID NO: 311 - DNA, 1432 bp, Homo sapiens
ggggcgtgctcgcggctataaggggcggaggctgggcggcgttgctctgcgctctgcggctgacggcgcttttgtctccggtgagttttgtggcgggaagcttctgcgctggtgcttagtaaccgactttcctccggactcctgcacgacctgctcctacagccggcgatccactcccggctgttcccccggagggtccagaggcctttcagaaggagaaggcagctctgtttctctgcagaggagtagggtcctttcagccatgaagcatgtgttgaacctctacctgttaggtgtggtactgaccctactctccatcttcgttagagtgatggagtccctagagggcttactagagagcccatcgcctgggacctcctggaccaccagaagccaactagccaacacagagcccaccaagggccttccagaccatccatccagaagcatgtgataagacctccttccatactggccatattttggaacactgacctagacatgtccagatgggagtcccattcctagcagacaagctgagcaccgttgtaaccagagaactattactaggccttgaagaacctgtctaactggatgctcattgcctgggcaaggcctgtttaggccggttgcggtggctcatgcctgtaatcctagcactttgggaggctgaggtgggtggatcacctgaggtcaggagttcgagaccagcctcgccaacatggcgaaaccccatctctactaaaaatacaaaagttagctgggtgtggtggcagaggcctgtaatcccagctccttgggaggctgaggcgggagaattgcttgaacccggggacggaggttgcagtgagccgagatcgcactgctgtacccagcctgggccacagtgcaagactccatctcaaaaaaaaaagaaaagaaaaagcctgtttaatgcacaggtgtgagtggattgcttatggctatgagataggttgatctcgcccttaccccggggtctggtgtatgctgtgctttcctcagcagtatggctctgacatctcttagatgtcccaacttcagctgttgggagatggtgatattttcaaccctacttcctaaacatctgtctggggttcctttagtcttgaatgtcttatgctcaattatttggtgttgagcctctcttccacaagagctcctccatgtttggatagcagttgaagaggttgtgtgggtgggctgttgggagtgaggatggagtgttcagtgcccatttctcattttacattttaaagtcgttcctccaacatagtgtgtattggtctgaagggggtggtgggatgccaaagcctgctcaagttatggacattgtggccaccatgtggcttaaatgattttttctaactaataaagtggaatatatatttctaaaaaaaaaaaaaaaaaaaaa

SEQ ID NO: 312 - DNA, 2805 bp, Homo sapiens
gattggctgggacggctgtgggtggggagaagccgggaggactgggtgcgcctgcagggatcggaagccggttggggtgtgagaggttttctcgctctagaacctcatagaaattctttctcagggagattcttcaagcaatcactatgtcaacagacacaggtgtttcccttccttcatatgaggaagatcagggatcaaaactcattcgaaaagctaaagaggcaccattcgtacccgttggaatagcgggttttgcagcaattgttgcatatggattatataaactgaagagcaggggaaatactaaaatgtccattcatctgatccacatgcgtgtggcagcccaaggctttgttgtaggagcaatgactgttggtatgggctattccatgtatcgggaattctgggcaaaacctaagccttagaagaagagatgctgtcttggtcttgttggaggagcttgctttagttagatgtcttattattaaagttacctattattgttggaaataaactaatttgtatgggtttagatggtaacatggcattttgaatattggcttcctttcttgcaggcttgatttgcttggtgaccgaattactagtgactagtttactaactaggtcattcaaggaagtcaagttaacttaaacatgtcacctaaatgcacttgatggtgttgaaatgtccaccttcttaaatttttaagatgaacttagttctaaagaagataacaggccaatcctgaaggtactccctgtttgctgcagaatgtcagatattttggatgttgcataagagtcctatttgccccagttaattcaacttttgtctgcctgttttgtggactggctggctctgttagaactctgtccaaaaagtgcatggaatataacttgtaaagcttcccacaattgacaatatatatgcatgtgtttaaaccaaatccagaaagcttaaacaatagagctgcataatagtatttattaaagaatcacaactgtaaacatgagaataatttaaggattctagtttagttttttgtaattgcaaattatatttttgctgctgatatattagaataatttttaaatgtcatcttgaaatagaaatatgtattttaagcactcacgcaaaggtaaatgaacacgttttaaatgtgtgtgttgctaattttttccataagaattgtaaacattgaactgaacaaattacctataatggatttggttaatgacttatgagcaagctggtttggccagacagtatacccaaacttttatataatatacagaaggctatcacacttgtgaaattctcttgtctaatctgaatttgcattccatggtgttaacatggtatatgtattgttattaaagtaagtgacccatgtcaaatgtcttttatttatttcatgaggaaaagctttctgtagaggaacaaatttgagaacaagtttcaggaaattgtcttttttgttgttgttctctaatcatgttctcctttctgtttcaacgattttaaaaatattttactttatggtatgttttattttttttccttttgtgggtaatttttgttctattgattatccatataaattttttttttttttttttgagacggagttattctctgtcatcttggctggcgtgcagtggcacgatcttggctcactgcaacttccatcccccaggttcaagtgattctcttgcctcagcctcctgagtagctgtgattacaggcatgcaccaacatgcctggctaatttttgtatatttagtagagacgaggtttcaccatgttggccaggctgatcttgaattcctgacctcaggttatccacctgcctcggcctcccaaagtgctaggattacaggcgtgagccaccacgcccagctgattatccatataattataacactcttctatttattttcagtcaccaataattccttttgagcaatatttaagcctagcatatttcttccttccctcctcctctactaaccagttctggtcgatatattattggattttactcttatactgtttgtttgtttgtttgtttgtttattttgagacagagtcttgctctgttgctgaggctggagtacagtggtgtgatctgagctcacggcaccctccacctcctagcttcgtgcgattctgatgcttcaaccttccgagtagctgggattacaggcatgcgccaccatgtcgggctaatttttgtgtttttagtaaaggcgaggtttcaccatgttggatgatcttgaactcctggcttcaagagatctatctgcctcagcctcccaaagtgctgggattacaagcataatccaccacacctgacctacttttgtatgttaaatgtgattatacttctctttgacttgtcagcttagctttagctgatacactctggtgcccaactattattgtatcagtgaacttccactttcttttccttttctctcaatttttgttgtatcattcctaccttgtgaggacatataatatttacattctgttgtcatcctcacatttcttagttccacagtttaaatgtatttgaaactcaaaacattcccattaatctcttggtcagctgaaattaatgatttaatagtttccttaaaaaagactcatggaacaatttccctaaatttttgccatgtcaaatatgtttatctgtagcctttacacagtaaaaacaatttggctagataatacaattctcagttcatatttttctttggaatattaaagtattgctatagagaaaaaaaaaaaaaaaa

SEQ ID NO: 313 - DNA, 5620 bp, Homo sapiens
gattgggccgctgtcaggtgtcgctgcctgcaggttcggctgcgcgagcggagggaggcggttccctcttatgcttttcatctccatccccagccccacccacagccagggggcttgggttctgagctgatggggtacccccctctgcagagcgggatgagtgggtgttccggcagggatgtggtcattgacggccagtgagggcgagagtaccacggcccacttcttccttggagctggagatgaggggctgggcacccgtggaataggcatgaggccagaagagagtgacagcgagctccttgaggatgaggaggatgaagtgcctcctgaacctcagatcattgttggcatctgtgccatgaccaagaaatccaagtccaagccaatgactcaaatcctagagcgactctgcagatttgactacctgactgttgtcattctgggagaagatgtaatccttaatgaacctgtggaaaactggccatcctgccactgcctcatctctttccactccaaaggctttcctctggacaaagctgttgcttactccaagcttcgaaacccctttcttatcaatgatctggccatgcagtattacatccaagataggagggaggtgtaccggatcctgcaggaagagggtattgatctgcctcgatatgctgtgctcaaccgtgatcctgcccggcctgaggaatgcaacctgatagaaggtgaagaccaagtagaggtcaatggagctgtctttcccaagccctttgtggagaagccagtgagtgcagaagaccacaatgtttacatctactaccccagctcagctggaggaggaagccagcgtctctttcgtaagattggcagccgaagcagtgtttactctcctgagagcagcgtccgaaagacggggtcgtacatctatgaggagtttatgccaacagatggcacagatgtcaaggtgtatacagtggggccagattatgcccatgctgaagctagaaaatctccagctttggatgggaaggttgaacgagacagtgaggggaaagagattcgatatccagtcatgctgactgccatggaaaagctggtggccaggaaagtctgcgtagctttcaagcaaacagtttgtggatttgaccttcttcgtgccaatggtcattcctttgtgtgtgatgtcaatggctttagttttgtcaagaactcgatgaaatactacgatgactgtgccaagattctggggaacaccataatgcgggagcttgccccacagttccagattccatggtccatccccacggaggctgaggacattcccattgttcccaccacatctggcactatgatggaacttcgttgtgtcattgcaattattcgtcatggggatcgtactcccaagcagaagatgaagatggaagtgaaacacccaaggttttttgctctgtttgaaaaacatggtggctacaagacagggaaattaaaactcaagcgacctgagcagctccaggaggtgctggatatcacaaggctgttgttggctgaactggagaaagaaccaggtggtgagatcgaggagaagactggaaaactagagcagctgaagtctgtactggagatgtatggtcacttctcaggtataaaccggaaggtacaattgacttactaccctcatggagtaaaagcttctaatgaggggcaagatccacagagggaaactctggccccatctctgttgctggtactgaagtggggtggagaactgactcctgctggccgtgttcaggctgaggagctggggcgagcttttcgctgcatgtaccctggaggacagggtgactatgctggcttccctggttgtgggctgcttcgtctccatagcactttccgccacgatctcaagatctatgcctctgatgagggtcgtgttcagatgactgctgctgccttcgccaagggccttctggctctagaaggggagctgacacccattttggtgcaaatggtgaagagtgccaacatgaatgggctactggacagcgatggggattccttgagcagctgccagcaccgggtgaaggctcggctgcaccatattctacagcaggatgcgccctttggccctgaggactacgatcagctggctcccaccagaagtacttccctgctcaactccatgactatcatccagaatcctgtgaaggtctgtgatcaggtatttgccctgatcgaaaacctcacccaccagatccgggaacgaatgcaggaccccaggtctgtagacctgcagctctaccacagtgagacactagagctaatgctacagcgttggagcaagctggagcgtgactttcgacagaagagtgggcgctatgatatcagtaagatccctgacatctatgactgtgtcaagtatgatgtgcagcacaatgggagtctgggacttcaaggcacagcagagttgctccgtctctctaaggcactggctgatgtggtcattccccaggagtacgggatcagtcgggaggagaaactggaaattgctgtgggcttctgtcttccactgttgcggaagatactacttgacctgcagagaacccacgaggatgagtctgtcaacaagctgcatcccctgtactcccgaggcgtgctctccccaggtcgccacgttcgaacgcgtctctatttcaccagtgagagccatgtccactccctgctcagtgtcttccgttatggaggacttcttgatgagacccaggatgcacaatggcagcgagctttggattatcttagtgccatctcagagcttaactacatgacccagattgtcatcatgctttatgaggacaacacacaggatcccttatcagaggaacggttccatgtggagctacacttcagccccggagtgaaaggtgttgaggaagaaggcagtgccccggctggctgtggattccgtccagcctcttctgagaatgaggagatgaaaaccaaccaaggcagtatggagaacctgtgtccaggaaaggcatcagatgaaccagaccgggcattgcagacttcaccccagcctcctgagggccctggccttccgaggagatcacccctcattcgtaaccgaaaagctggttccatggaggtactttctgagacttcatcctcgaggcctggtggctaccggctcttttcatcttcacggccacccacagaaatgaagcagagtggcctaggctcacagtgcacagggctgttcagcaccacagtgctgggtggctcctccagtgccccgaatcttcaggactacgcccgcagccatggcaaaaagctaccacctgccagtctgaagcaccgagatgggtttgaagggtgttccatggtgcctaccatctaccctctggaaacactgcataatgccctttccctacgtcaagtgagtgaattcttgagtagagtctgccagcgccacactgatgcccaggcacaggcatctgcagccctctttgattccatgcacagcagccaggcctcagataacccattttctccaccacgtactcttcattcacctcccctgcaactccagcagcgctctgagaagcccccttggtacagcagtggcccttctagcactgtgtccagtgctggtccttcttcccctactacagtagatggtaactcccaatttggcttcagtgatcaaccctccctaaattcacacgtggctgaagaacatcaaggccttgggctgctccaggagacccctgggagtggagcacaagagctctccatagaaggggagcaagagctttttgaaccaaatcagtccccacaggtgccacctatggaaaccagccagccatacgaggaggtcagccagccatgtcaggaggtccctgacatcagccagccatgccaggacatttctgaggcgctcagccagccatgtcagaaggtccctgacatcagccagcaatgccaggagaaccatgacaatggtaaccacacatgccaggaggtccctcacatcagccagccatgccagaagtccagccaactgtgccagaaagtctctgaggaagtttgccagctatgtctggagaactccgaggaggtcagccagccatgccagggggtctctgtggaggttggcaagctggtccataagttccatgtaggggttggtagcttggtccaggaaacccttgtagaagttggcagcccagctgaagagatccctgaggaggtcatccagccataccaggagttctctgtggaggttggcaggctggcccaggagacttctgcgatcaatctgttatctcagggcatccctgagattgataaaccatcccaagagttccctgaggagattgatctgcaggcccaggaggtccctgaggagataaattagaagtcctgggtggtccctgaagtgattgatcagctgcctggagagggtattcctcaagcccagcatccatctggtgatccaaaccctcagagccagtctctagcccatgaccagcactcaccccttccaccagcaacatgtgattaattttctcattagtggtatcacactataccagccatttgagccagcaaccttttctgttggctaactcactggccagctctcaccagcggtgtctggggaagtagttctctttgtatgaagcatacctgtgccagagctgtggttgaggaggagccagttttaggttcgaagaagccattggctcctcacttagccattagacttgaataggatttccttggggtgggttggtctgtcattacccagccttctctgagcatcctaggaaatcacagattgttaaaggaaatgccgcttcactgctgaagacaccatctggcgacagcaaatgcaaaagaggggactctagggtcttcacttttctggggaaatgttcacgacttctcaaggtacgcttagaccatatgtgcattcaggggactcttgtctttgccagcactcctcaggtgagcccgggatggctatctgaaatgtctggaaaatagagtcccttccccaaacatctgacatggccactaaatctttagacttgccttatagatccttccatatcatccccaagtgccccttctgcctcagtcctgttcctctgggcaatagctctagggaaaagtaggtattagactgctgtgcaaaattcagagcaactacttaaaatgctctagaggattcttagccagtctgtgaaagtgggcctcctctgtggtggggctgtttggcttaggagatgctgtagtagtagagataatcaggttctattttaagcaatcagcagagatcaatattgtacagatacaagcaaaggtttaataaatatatatatatatatttatttctgtagttgtgccagggacagactggccaaagaccaaacactgcagggtccccaagaaatttgtccttatatcattgtgtctgagggccagatatgattatgaagctttttccaaagatccagggatgggaatgggagtgggtaggaggggtaatgcggtcattggagtcgggggctggaacattatgagtgctcaataaatataaactaatgagaatggtggtgatggaaaa

SEQ ID NO: 314 - DNA, 2356 bp, Homo sapiens
gacacacgcgaggcgctgtcctttcagcaccacaagctcgggctgaggagggaggactcctggccgtcctcctcctcttcaaattggcttgaatcttctctgaccccccacgagtgcagcacagtctgggaagaaaggcgtaaggatggtgaagctgaacagtaaccccagcgagaagggaaccaagccgccttcagttgaggatggcttccagaccgtccctctcatcactcccttggaggttaatcacttacagctgcctgctccagaaaaggtgattgtgaagacaagaacggaatatcagccggaacagaagaacaaagggaagttccgggtgccgaaaatcgctgaatttacggtcaccatccttgtcagcctggccctagctttccttgcgtgcatcgtgttcctggtggtttacaaagccttcacctatgatcacagctgcccagagggattcgtctataagcacaaacgctgtatcccagcctccctggatgcttactactcctcccaggaccccaattccagaagccgcttctacacagtcatcagccactacagcgtggccaagcagagcactgcccgggccatcgggccgtggctgtcagcagccgctgtcatccatgagcccaagccgcccaagacccagggccactagaggcctgccccagccagaatggggggcggggtggagaggaggacccccattggctaagccaagctccagttacaagacaacactgtactcctgggatatgggggcgggggcggggcagggcagggtggggggaagaacgcaccaaaaacgtggtgtgtgctggagttgtctgaaccgatatttctttttgttccttggtattgttgattcgtcgccgagtcaggctcatgtacaaaggcatgtttcgtgttgattgttcccatgtaagatatttttaaagccactgcttattctttgttaggaaaatgtaacagcagaaaaggaaagaaacaaagaacatgaacaaaaagcattaaactggctccatcggaagacgttgaagggcagtgaagagcacagactctgtgggcttcttagataagaaaacgtagcttcagtgggggctccagggttgcagagtatgagtgacacagaccgggactattccattagcctgtggtctgcagggtaggcccgcaggaaatgaggaatggccaagctggagagaagagctgattttggcattactaagcccagaatgcacataacccatagtgaaatgtgctggcctctggtgcattttgcaagatgagcacaaactttctgggcctccatcctaggacctgggcagacccacatggcctgggctctgaatgcccaccctgcgacggtgggttctgcatcagcaaacgctgaggagtgggcagattttctttgtcttttgcttgcattttctagatccacacctggatactgcccatgttgacgagacagcagcagggggagagggagggaaggaaggtgcggctgcaagaaggaaggcacgggacaggcatgtgacactaggccacaagcgataagcacaggcacctgacttttaagtttttgtttgtttgttgtttcccaaagtgctgataacaataacaacaacaataggattccaaccaggagcctcaagtgacagccaggaagagacctgaaggttggggccaccacaatgccaaatcgtttctaaaggaagctgaaaaatgggactgtcttttgcccacttcgttgtgttaaaaggggacatttgtccaaactccccaaccgagttctagaagctcctgacaaggaggcagcatccagccttgaccaggcctcccagttccctggaaccgtatcaggcattcccctgcctctcacaaatgtttcagggaggccagttctgcagggtgtcagctccaggacccacagggccagaaccagctgggagaattggttatttgagatgtggtactgcttcctcacaagtctcccacaggccatgtaaagggtatttttttgtggcttgctgtgttgctgagatcatcgtatgcaacagctgggtaataagactagcatagctcaaactatcctgccaaacgctctcatctgatttttcctcccttctcccccaacctccaatcaccctgagtcacctgtaaattcatttgtcattcaaagcggaataacaagttgtccctagcaaaaccgctgagcgctttataattttgtggtgtatttttgtcagtaggtagcagaggcggaagtattttttggtgtaattcttgaaattttctgacaggaaacaaataaagatagatgtgtctgagaaaaaaaaaaaaaaaaaaaaaa

SEQ ID NO: 315 - DNA, 13481 bp, Homo sapiens
gctgccgggacgggtccaagatggacggccgctcaggttctgcttttacctgcggcccagagccccattcattgccccggtgctgagcggcgccgcgagtcggcccgaggcctccggggactgccgtgccgggcgggagaccgccatggcgaccctggaaaagctgatgaaggccttcgagtccctcaagtccttccagcagcagcagcagcagcagcagcagcagcagcagcagcagcagcagcagcagcagcagcagcaacagccgccaccgccgccgccgccgccgccgcctcctcagcttcctcagccgccgccgcaggcacagccgctgctgcctcagccgcagccgcccccgccgccgcccccgccgccacccggcccggctgtggctgaggagccgctgcaccgaccaaagaaagaactttcagctaccaagaaagaccgtgtgaatcattgtctgacaatatgtgaaaacatagtggcacagtctgtcagaaattctccagaatttcagaaacttctgggcatcgctatggaactttttctgctgtgcagtgatgacgcagagtcagatgtcaggatggtggctgacgaatgcctcaacaaagttatcaaagctttgatggattctaatcttccaaggttacagctcgagctctataaggaaattaaaaagaatggtgcccctcggagtttgcgtgctgccctgtggaggtttgctgagctggctcacctggttcggcctcagaaatgcaggccttacctggtgaaccttctgccgtgcctgactcgaacaagcaagagacccgaagaatcagtccaggagaccttggctgcagctgttcccaaaattatggcttcttttggcaattttgcaaatgacaatgaaattaaggttttgttaaaggccttcatagcgaacctgaagtcaagctcccccaccattcggcggacagcggctggatcagcagtgagcatctgccagcactcaagaaggacacaatatttctatagttggctactaaatgtgctcttaggcttactcgttcctgtcgaggatgaacactccactctgctgattcttggcgtgctgctcaccctgaggtatttggtgcccttgctgcagcagcaggtcaaggacacaagcctgaaaggcagcttcggagtgacaaggaaagaaatggaagtctctccttctgcagagcagcttgtccaggtttatgaactgacgttacatcatacacagcaccaagaccacaatgttgtgaccggagccctggagctgttgcagcagctcttcagaacgcctccacccgagcttctgcaaaccctgaccgcagtcgggggcattgggcagctcaccgctgctaaggaggagtctggtggccgaagccgtagtgggagtattgtggaacttatagctggagggggttcctcatgcagccctgtcctttcaagaaaacaaaaaggcaaagtgctcttaggagaagaagaagccttggaggatgactctgaatcgagatcggatgtcagcagctctgccttaacagcctcagtgaaggatgagatcagtggagagctggctgcttcttcaggggtttccactccagggtcagcaggtcatgacatcatcacagaacagccacggtcacagcacacactgcaggcggactcagtggatctggccagctgtgacttgacaagctctgccactgatggggatgaggaggatatcttgagccacagctccagccaggtcagcgccgtcccatctgaccctgccatggacctgaatgatgggacccaggcctcgtcgcccatcagcgacagctcccagaccaccaccgaagggcctgattcagctgttaccccttcagacagttctgaaattgtgttagacggtaccgacaaccagtatttgggcctgcagattggacagccccaggatgaagatgaggaagccacaggtattcttcctgatgaagcctcggaggccttcaggaactcttccatggcccttcaacaggcacatttattgaaaaacatgagtcactgcaggcagccttctgacagcagtgttgataaatttgtgttgagagatgaagctactgaaccgggtgatcaagaaaacaagccttgccgcatcaaaggtgacattggacagtccactgatgatgactctgcacctcttgtccattgtgtccgccttttatctgcttcgtttttgctaacagggggaaaaaatgtgctggttccggacagggatgtgagggtcagcgtgaaggccctggccctcagctgtgtgggagcagctgtggccctccacccggaatctttcttcagcaaactctataaagttcctcttgacaccacggaataccctgaggaacagtatgtctcagacatcttgaactacatcgatcatggagacccacaggttcgaggagccactgccattctctgtgggaccctcatctgctccatcctcagcaggtcccgcttccacgtgggagattggatgggcaccattagaaccctcacaggaaatacattttctttggcggattgcattcctttgctgcggaaaacactgaaggatgagtcttctgttacttgcaagttagcttgtacagctgtgaggaactgtgtcatgagtctctgcagcagcagctacagtgagttaggactgcagctgatcatcgatgtgctgactctgaggaacagttcctattggctggtgaggacagagcttctggaaacccttgcagagattgacttcaggctggtgagctttttggaggcaaaagcagaaaacttacacagaggggctcatcattatacagggcttttaaaactgcaagaacgagtgctcaataatgttgtcatccatttgcttggagatgaagaccccagggtgcgacatgttgccgcagcatcactaattaggcttgtcccaaagctgttttataaatgtgaccaaggacaagctgatccagtagtggccgtggcaagagatcaaagcagtgtttacctgaaacttctcatgcatgagacgcagcctccatctcatttctccgtcagcacaataaccagaatatatagaggctataacctactaccaagcataacagacgtcactatggaaaataacctttcaagagttattgcagcagtttctcatgaactaatcacatcaaccaccagagcactcacatttggatgctgtgaagctttgtgtcttctttccactgccttcccagtttgcatttggagtttaggttggcactgtggagtgcctccactgagtgcctcagatgagtctaggaagagctgtaccgttgggatggccacaatgattctgaccctgctctcgtcagcttggttcccattggatctctcagcccatcaagatgctttgattttggccggaaacttgcttgcagccagtgctcccaaatctctgagaagttcatgggcctctgaagaagaagccaacccagcagccaccaagcaagaggaggtctggccagccctgggggaccgggccctggtgcccatggtggagcagctcttctctcacctgctgaaggtgattaacatttgtgcccacgtcctggatgacgtggctcctggacccgcaataaaggcagccttgccttctctaacaaaccccccttctctaagtcccatccgacgaaaggggaaggagaaagaaccaggagaacaagcatctgtaccgttgagtcccaagaaaggcagtgaggccagtgcagcttctagacaatctgatacctcaggtcctgttacaacaagtaaatcctcatcactggggagtttctatcatcttccttcatacctcaaactgcatgatgtcctgaaagctacacacgctaactacaaggtcacgctggatcttcagaacagcacggaaaagtttggagggtttctccgctcagccttggatgttctttctcagatactagagctggccacactgcaggacattgggaagtgtgttgaagagatcctaggatacctgaaatcctgctttagtcgagaaccaatgatggcaactgtttgtgttcaacaattgttgaagactctctttggcacaaacttggcctcccagtttgatggcttatcttccaaccccagcaagtcacaaggccgagcacagcgccttggctcctccagtgtgaggccaggcttgtaccactactgcttcatggccccgtacacccacttcacccaggccctcgctgacgccagcctgaggaacatggtgcaggcggagcaggagaacgacacctcgggatggtttgatgtcctccagaaagtgtctacccagttgaagacaaacctcacgagtgtcacaaagaaccgtgcagataagaatgctattcataatcacattcgtttgtttgaacctcttgttataaaagctttaaaacagtacacgactacaacatgtgtgcagttacagaagcaggttttagatttgctggcgcagctggttcagttacgggttaattactgtcttctggattcagatcaggtgtttattggctttgtattgaaacagtttgaatacattgaagtgggccagttcagggaatcagaggcaatcattccaaacatctttttcttcttggtattactatcttatgaacgctatcattcaaaacagatcattggaattcctaaaatcattcagctctgtgatggcatcatggccagtggaaggaaggctgtgacacatgccataccggctctgcagcccatagtccacgacctctttgtattaagaggaacaaataaagctgatgcaggaaaagagcttgaaacccaaaaagaggtggtggtgtcaatgttactgagactcatccagtaccatcaggtgttggagatgttcattcttgtcctgcagcagtgccacaaggagaatgaagacaagtggaagcgactgtctcgacagatagctgacatcatcctcccaatgttagccaaacagcagatgcacattgactctcatgaagcccttggagtgttaaatacattatttgagattttggccccttcctccctccgtccggtagacatgcttttacggagtatgttcgtcactccaaacacaatggcgtccgtgagcactgttcaactgtggatatcgggaattctggccattttgagggttctgatttcccagtcaactgaagatattgttctttctcgtattcaggagctctccttctctccgtatttaatctcctgtacagtaattaataggttaagagatggggacagtacttcaacgctagaagaacacagtgaagggaaacaaataaagaatttgccagaagaaacattttcaaggtttctattacaactggttggtattcttttagaagacattgttacaaaacagctgaaggtggaaatgagtgagcagcaacatactttctattgccaggaactaggcacactgctaatgtgtctgatccacatcttcaagtctggaatgttccggagaatcacagcagctgccactaggctgttccgcagtgatggctgtggcggcagtttctacaccctggacagcttgaacttgcgggctcgttccatgatcaccacccacccggccctggtgctgctctggtgtcagatactgctgcttgtcaaccacaccgactaccgctggtgggcagaagtgcagcagaccccgaaaagacacagtctgtccagcacaaagttacttagtccccagatgtctggagaagaggaggattctgacttggcagccaaacttggaatgtgcaatagagaaatagtacgaagaggggctctcattctcttctgtgattatgtctgtcagaacctccatgactccgagcacttaacgtggctcattgtaaatcacattcaagatctgatcagcctttcccacgagcctccagtacaggacttcatcagtgccgttcatcggaactctgctgccagcggcctgttcatccaggcaattcagtctcgttgtgaaaacctttcaactccaaccatgctgaagaaaactcttcagtgcttggaggggatccatctcagccagtcgggagctgtgctcacgctgtatgtggacaggcttctgtgcacccctttccgtgtgctggctcgcatggtcgacatccttgcttgtcgccgggtagaaatgcttctggctgcaaatttacagagcagcatggcccagttgccaatggaagaactcaacagaatccaggaataccttcagagcagcgggctcgctcagagacaccaaaggctctattccctgctggacaggtttcgtctctccaccatgcaagactcacttagtccctctcctccagtctcttcccacccgctggacggggatgggcacgtgtcactggaaacagtgagtccggacaaagactggtacgttcatcttgtcaaatcccagtgttggaccaggtcagattctgcactgctggaaggtgcagagctggtgaatcggattcctgctgaagatatgaatgccttcatgatgaactcggagttcaacctaagcctgctagctccatgcttaagcctagggatgagtgaaatttctggtggccagaagagtgccctttttgaagcagcccgtgaggtgactctggcccgtgtgagcggcaccgtgcagcagctccctgctgtccatcatgtcttccagcccgagctgcctgcagagccggcggcctactggagcaagttgaatgatctgtttggggatgctgcactgtatcagtccctgcccactctggcccgggccctggcacagtacctggtggtggtctccaaactgcccagtcatttgcaccttcctcctgagaaagagaaggacattgtgaaattcgtggtggcaacccttgaggccctgtcctggcatttgatccatgagcagatcccgctgagtctggatctccaggcagggctggactgctgctgcctggccctgcagctgcctggcctctggagcgtggtctcctccacagagtttgtgacccacgcctgctccctcatctactgtgtgcacttcatcctggaggccgttgcagtgcagcctggagagcagcttcttagtccagaaagaaggacaaataccccaaaagccatcagcgaggaggaggaggaagtagatccaaacacacagaatcctaagtatatcactgcagcctgtgagatggtggcagaaatggtggagtctctgcagtcggtgttggccttgggtcataaaaggaatagcggcgtgccggcgtttctcacgccattgctaaggaacatcatcatcagcctggcccgcctgccccttgtcaacagctacacacgtgtgcccccactggtgtggaagcttggatggtcacccaaaccgggaggggattttggcacagcattccctgagatccccgtggagttcctccaggaaaaggaagtctttaaggagttcatctaccgcatcaacacactaggctggaccagtcgtactcagtttgaagaaacttgggccaccctccttggtgtcctggtgacgcagcccctcgtgatggagcaggaggagagcccaccagaagaagacacagagaggacccagatcaacgtcctggccgtgcaggccatcacctcactggtgctcagtgcaatgactgtgcctgtggccggcaacccagctgtaagctgcttggagcagcagccccggaacaagcctctgaaagctctcgacaccaggtttgggaggaagctgagcattatcagagggattgtggagcaagagattcaagcaatggtttcaaagagagagaatattgccacccatcatttatatcaggcatgggatcctgtcccttctctgtctccggctactacaggtgccctcatcagccacgagaagctgctgctacagatcaaccccgagcgggagctggggagcatgagctacaaactcggccaggtgtccatacactccgtgtggctggggaacagcatcacacccctgagggaggaggaatgggacgaggaagaggaggaggaggccgacgcccctgcaccttcgtcaccacccacgtctccagtcaactccaggaaacaccgggctggagttgacatccactcctgttcgcagtttttgcttgagttgtacagccgctggatcctgccgtccagctcagccaggaggaccccggccatcctgatcagtgaggtggtcagatcccttctagtggtctcagacttgttcaccgagcgcaaccagtttgagctgatgtatgtgacgctgacagaactgcgaagggtgcacccttcagaagacgagatcctcgctcagtacctggtgcctgccacctgcaaggcagctgccgtccttgggatggacaaggccgtggcggagcctgtcagccgcctgctggagagcacgctcaggagcagccacctgcccagcagggttggagccctgcacggcgtcctctatgtgctggagtgcgacctgctggacgacactgccaagcagctcatcccggtcatcagcgactatctcctctccaacctgaaagggatcgcccactgcgtgaacattcacagccagcagcacgtactggtcatgtgtgccactgcgttttacctcattgagaactatcctctggacgtagggccggaattttcagcatcaataatacagatgtgtggggtgatgctgtctggaagtgaggagtccaccccctccatcatttaccactgtgccctcagaggcctggagcgcctcctgctctctgagcagctctcccgcctggatgcagaatcgctggtcaagctgagtgtggacagagtgaacgtgcacagcccgcaccgggccatggcggctctgggcctgatgctcacctgcatgtacacaggaaaggagaaagtcagtccgggtagaacttcagaccctaatcctgcagcccccgacagcgagtcagtgattgttgctatggagcgggtatctgttctttttgataggatcaggaaaggctttccttgtgaagccagagtggtggccaggatcctgccccagtttctagacgacttcttcccaccccaggacatcatgaacaaagtcatcggagagtttctgtccaaccagcagccatacccccagttcatggccaccgtggtgtataaggtgtttcagactctgcacagcaccgggcagtcgtccatggtccgggactgggtcatgctgtccctctccaacttcacgcagagggccccggtcgccatggccacgtggagcctctcctgcttctttgtcagcgcgtccaccagcccgtgggtcgcggcgatcctcccacatgtcatcagcaggatgggcaagctggagcaggtggacgtgaaccttttctgcctggtcgccacagacttctacagacaccagatagaggaggagctcgaccgcagggccttccagtctgtgcttgaggtggttgcagccccaggaagcccatatcaccggctgctgacttgtttacgaaatgtccacaaggtcaccacctgctgagcgccatggtgggagagactgtgaggcggcagctggggccggagcctttggaagtctgcgcccttgtgccctgcctccaccgagccagcttggtccctatgggcttccgcacatgccgcgggcggccaggcaacgtgcgtgtctctgccatgtggcagaagtgctctttgtggcagtggccaggcagggagtgtctgcagtcctggtggggctgagcctgaggccttccagaaagcaggagcagctgtgctgcaccccatgtgggtgaccaggtcctttctcctgatagtcacctgctggttgttgccaggttgcagctgctcttgcatctgggccagaagtcctccctcctgcaggctggctgttggcccctctgctgtcctgcagtagaaggtgccgtgagcaggctttgggaacactggcctgggtctccctggtggggtgtgcatgccacgccccgtgtctggatgcacagatgccatggcctgtgctgggccagtggctgggggtgctagacacccggcaccattctcccttctctcttttcttctcaggatttaaaatttaattatatcagtaaagagattaattttaacgtaactctttctatgcccgtgtaaagtatgtgaatcgcaaggcctgtgctgcatgcgacagcgtccggggtggtggacagggcccccggccacgctccctctcctgtagccactggcatagccctcctgagcacccgctgacatttccgttgtacatgttcctgtttatgcattcacaaggtgactgggatgtagagaggcgttagtgggcaggtggccacagcaggactgaggacaggcccccattatcctaggggtgcgctcacctgcagcccctcctcctcgggcacagacgactgtcgttctccacccaccagtcagggacagcagcctccctgtcactcagctgagaaggccagccctccctggctgtgagcagcctccactgtgtccagagacatgggcctcccactcctgttccttgctagccctggggtggcgtctgcctaggagctggctggcaggtgttgggacctgctgctccatggatgcatgccctaagagtgtcactgagctgtgttttgtctgagcctctctcggtcaacagcaaagcttggtgtcttggcactgttagtgacagagcccagcatcccttctgcccccgttccagctgacatcttgcacggtgaccccttttagtcaggagagtgcagatctgtgctcatcggagactgccccacggccctgtcagagccgccactcctatccccaggccaggtccctggaccagcctcctgtttgcaggcccagaggagccaagtcattaaaatggaagtggattctggatggccgggctgctgctgatgtaggagctggatttgggagctctgcttgccgactggctgtgagacgaggcaggggctctgcttcctcagccctagaggcgagccaggcaaggttggcgactgtcatgtggcttggtttggtcatgcccgtcgatgttttgggtattgaatgtggtaagtggaggaaatgttggaactctgtgcaggtgctgccttgagacccccaagcttccacctgtccctctcctatgtggcagctggggagcagctgagatgtggacttgtatgctgcccacatacgtgagggggagctgaaagggagcccctcctctgagcagcctctgccaggcctgtatgaggcttttcccaccagctcccaacagaggcctcccccagccaggaccacctcgtcctcgtggcggggcagcaggagcggtagaaaggggtccgatgtttgaggaggcccttaagggaagctactgaattataacacgtaagaaaatcaccattccgtattggttgggggctcctgtttctcatcctagctttttcctggaaagcccgctagaaggtttgggaacgaggggaaagttctcagaactgttggctgctccccacccgcctcccgcctcccccgcaggttatgtcagcagctctgagacagcagtatcacaggccagatgttgttcctggctagatgtttacatttgtaagaaataacactgtgaatgtaaaacagagccattcccttggaatgcatatcgctgggctcaacatagagtttgtcttcctcttgtttacgacgtgatctaaaccagtccttagcaaggggctcagaacaccccgctctggcagtaggtgtcccccacccccaaagacctgcctgtgtgctccggagatgaatatgagctcattagtaaaaatgacttcacccacgcatatacataaagtatccatgcatgtgcatatagacacatctataattttacacacacacctctcaagacggagatgcatggcctctaagagtgcccgtgtcggttcttcctggaagttgactttccttagacccgccaggtcaagttagccgcgtgacggacatccaggcgtgggacgtggtcagggcagggctcattcattgcccactaggatcccactggcgaagatggtctccatatcagctctctgcagaagggaggaagactttatcatgttcctaaaaatctgtggcaagcacccatcgtattatccaaattttgttgcaaatgtgattaatttggttgtcaagttttgggggtgggctgtggggagattgcttttgttttcctgctggtaatatcgggaaagattttaatgaaaccagggtagaattgtttggcaatgcactgaagcgtgtttctttcccaaaatgtgcctcccttccgctgcgggcccagctgagtctatgtaggtgatgtttccagctgccaagtgctctttgttactgtccaccctcatttctgccagcgcatgtgtcctttcaaggggaaaatgtgaagctgaaccccctccagacacccagaatgtagcatctgagaaggccctgtgccctaaaggacacccctcgcccccatcttcatggagggggtcatttcagagccctcggagccaatgaacagctcctcctcttggagctgagatgagccccacgtggagctcgggacggatagtagacagcaataactcggtgtgtggccgcctggcaggtggaacttcctcccgttgcggggtggagtgaggttagttctgtgtgtctggtgggtggagtcaggcttctcttgctacctgtgagcatccttcccagcagacatcctcatcgggctttgtccctcccccgcttcctccctctgcggggaggacccgggaccacagctgctggccagggtagacttggagctgtcctccagaggggtcacgtgtaggagtgagaagaaggaagatcttgagagctgctgagggaccttggagagctcaggatggctcagacgaggacactcgcttgccgggcctgggcctcctgggaaggagggagctgctcagaatgccgcatgacaactgaaggcaacctggaaggttcaggggccgctcttcccccatgtgcctgtcacgctctggtgcagtcaaaggaacgccttcccctcagttgtttctaagagcagagtctcccgctgcaatctgggtggtaactgccagccttggaggatcgtggccaacgtggacctgcctacggagggtgggctctgacccaagtggggcctccttgtccaggtctcactgctttgcaccgtggtcagagggactgtcagctgagcttgagctcccctggagccagcagggctgtgatgggcgagtcccggagccccacccagacctgaatgcttctgagagcaaagggaaggactgacgagagatgtatatttaattttttaactgctgcaaacattgtacatccaaattaaaggaaaaaaatggaaaccatca

SEQ ID NO: 316 - DNA, 1527 bp, Homo sapiens
catccccgaccagccccaaggtcttcccgctgagcctctgcagcacccagccagatgggaacgtggtcatcgcctgcctggtccagggcttcttcccccaggagccactcagtgtgacctggagcgaaagcggacagggcgtgaccgccagaaacttcccacccagccaggatgcctccggggacctgtacaccacgagcagccagctgaccctgccggccacacagtgcctagccggcaagtccgtgacatgccacgtgaagcactacacgaatcccagccaggatgtgactgtgccctgcccaggtcagagggcaggctggggagtggggcggggccaccccgtcgtgccctgacactgcgcctgcacccgtgttccccacagggagccgccccttcactcacaccagagtggaccgcgggccgagccccaggaggtggtggtggacaggccaggaggggcgaggcgggggcatggggaagtatgtgctgaccagctcaggccatctctccactccagttccctcaactccacctaccccatctccctcaactccacctaccccatctccctcatgctgccacccccgactgtcactgcaccgaccggccctcgaggacctgctcttaggttcagaagcgaacctcacgtgcacactgaccggcctgagagatgcctcaggtgtcaccttcacctggacgccctcaagtgggaagagcgctgttcaaggaccacctgagcgtgacctctgtggctgctacagcgtgtccagtgtcctgccgggctgtgccgagccatggaaccatgggaagaccttcacttgcactgctgcctaccccgagtccaagaccccgctaaccgccaccctctcaaaatccggtgggtccagaccctgctcggggccctgctcagtgctctggtttgcaaagcatattcctggcctgcctcctccctcccaatcctgggctccagtgctcatgccaagtacagagggaaactgaggcaggctgaggggccaggacacagcccagggtgcccaccagagcagaggggctctctcatcccctgcccagccccctgacctggctctctaccctccaggaaacacattccggcccgaggtccacctgctgccgccgccgtcggaggagctggccctgaacgagctggtgacgctgacgtgcctggcacgcggcttcagccccaaggatgtgctggttcgctggctgcaggggtcacaggagctgccccgcgagaagtacctgacttgggcatcccggcaggagcccagccagggcaccaccaccttcgctgtgaccagcatactgcgcgtggcagccgaggactggaagaagggggacaccttctcctgcatggtgggccacgaggccctgccgctggccttcacacagaagaccatcgaccgcttggcgggtaaacccacccatgtcaatgtgtctgttgtcatggcggaggtggacggcacctgctactgagccgcccgcctgtccccacccctgaataaa

SEQ ID NO: 317 - DNA, 1704 bp, Homo sapiens
cctccaccaagggcccatcggtcttccccctggcaccctcctccaagagcacctctgggggcacagcagccctgggctgcctggtcaaggactacttccccgaaccggtgacggtgtcgtggaactcaggcgccctgaccagcggcgtgcacaccttcccggctgtcctacagtcctcaggactctactccctcagcagcgtggtgaccgtgccctccagcagcttgggcacccagacctacatctgcaacgtgaatcacaagcccagcaacaccaaggtggacaagaaagttggtgagaggccagcacagggagggagggtgtctgctggaagccaggctcagcgctcctgcctggacgcatcccggctatgcagccccagtccagggcagcaaggcaggccccgtctgcctcttcacccggaggcctctgcccgccccactcatgctcagggagagggtcttctggctttttccccaggctctgggcaggcacaggctaggtgcccctaacccaggccctgcacacaaaggggcaggtgctgggctcagacctgccaagagccatatccgggaggaccctgcccctgacctaagcccaccccaaaggccaaactctccactccctcagctcggacaccttctctcctcccagattccagtaactcccaatcttctctctgcagagcccaaatcttgtgacaaaactcacacatgcccaccgtgcccaggtaagccagcccaggcctcgccctccagctcaaggcgggacaggtgccctagagtagcctgcatccagggacaggccccagccgggtgctgacacgtccacctccatctcttcctcagcacctgaactcctggggggaccgtcagtcttcctcttccccccaaaacccaaggacaccctcatgatctcccggacccctgaggtcacatgcgtggtggtggacgtgagccacgaagaccctgaggtcaagttcaactggtacgtggacggcgtggaggtgcataatgccaagacaaagccgcgggaggagcagtacaacagcacgtaccgtgtggtcagcgtcctcaccgtcctgcaccaggactggctgaatggcaaggagtacaagtgcaaggtctccaacaaagccctcccagcccccatcgagaaaaccatctccaaagccaaaggtgggacccgtggggtgcgagggccacatggacagaggccggctcggcccaccctctgccctgagagtgaccgctgtaccaacctctgtccctacagggcagccccgagaaccacaggtgtacaccctgcccccatcccgggatgagctgaccaagaaccaggtcagcctgacctgcctggtcaaaggcttctatcccagcgacatcgccgtggagtgggagagcaatgggcagccggagaacaactacaagaccacgcctcccgtgctggactccgacggctccttcttcctctacagcaagctcaccgtggacaagagcaggtggcagcaggggaacgtcttctcatgctccgtgatgcatgaggctctgcacaaccactacacacagaagagcctctccctgtctccgggtaaatgagtgccacggccggcaagcccccgctccccaggctctcggggtcgcgcgaggatgcttggcacgtaccccgtgtacatacttcccaggcacccagcatggaaataaa

SEQ ID NO: 318 - DNA, 477 bp, Homo sapiens
atggacatgagggtccccgctcagctcctggggcttctgctgctctggctcccaggtaaggaaggagaacactaacagtttactcagcccagggggctcagtacagcctggctattcagggaaattctcttactacatgattaattgtgtggaccatttgtgtttatgcttccaatctcaggtgccagatgtgccatccagttgacccagtctccatcctccctgtctgcatctgtaggagacagagtcaccatcacttgccgggcaagtcagggcattagcagtgctttagcctggtatcagcagaaaccagggaaagctcctaagctcctgatctatgatgcctccagtttggaaagtggggtcccatcaaggttcagcggcagtggatctgggacagatttcactctcaccatcagcagcctgcagcctgaagattttgcaacttattactgtcaacagtttaataattaccct

SEQ ID NO: 319 - DNA, 884612 bp, Homo sapiens
atggcctggacccctctcctcctccagcttctcaccctctgctcaggtgactgcctgtggaatgccaaagtgattattggggacacatgggatgacttttctcttatattttaacattgtggggtgggtagtgaacccagactcacctctctgtgcctgcctcctctgttccagggtcctgggcacagtctgcgctgacccaggaagcctcggtgtcagggaccgtgggacagaaggtcaccctctcctgtactggaaacagcaacaacgttggaagttatgctgtgggctggtaccaacagatttctcacggtgctcccaaaactgtgatgtttggaaattctctgccctcagggatccctgaccgcttctctggctcaaagtctgggaccacagcctccctgactatctcgggcctctagcctgaggacgaggctgattattactgttcaacatgggactacagcctcagtgctcacacagtgctgcaggcacatggggaaccgagacaaaaacctgcccttggcctgtcccgaggctgatcactccatacttgcctatgacaaacaaagagggtgcctgtggctgatcgtacagtttaagcaagggaggaagtgagactcagccacaggcccctgcaaagggtcagcgggccttgttcccacattgtctctatttgaaaaagtgagataaatttcacttcgtataaaatgtacaattaaattgtcttattgtgtttacagaattatgcatctatcaccataatctaattttaaaacgttttcatcaccccacaaaaaaacccccacaattagcagccacccttcaccctttctccccagccactggtcattgctaaagactttctgtaaagaacatgcatttaaagacctaagaaactcagtgatgccaaacagctaggtttttcaaatgcccaagcatgtaataatagattactgaaaccaaagataaagacacaattatgaaagcagacagaaagctttataatatatacagaaaatcaacaattcaaacaatgagaggtattttatgagtatacattgaggccaaatggcagtgttatgttcttacaaagtcaaaagaaagaaagaaagaactgttgagtcataatgctatatccaggtaaagattttttttttttaaaaaaggtaaaaaataagactttgtcagatgaagaaaacctgaaagaattcatctaaaaaaaatcaaaacaaatcaactctaagagaaaattttcaggtggaagataaatgataatggaaacattgaacccaaagaatgcaggaagaataaccaataaatatagtagtaaaagaccaaatttttagctctacagttctggaaaatatgcatatcaaaagctaagttatagcatttttgatataatttctacttatgaaaaatattatatatacatatatacacatatatacatatatatacacacacacacacacacacacacacacacacacacacacacatatatatatatacatgaaacttcaaccaaaagaaggaactgtaaggggtctacatgactgggaaaatattaggcctattattaaatctaaatagatcatgaatagttacatgtacatgttgtaatctttacagcaaccaatgtaaaactgtgcagagataccaatataaaatcaatataaaaatcaaaagagcccactaaataatactcaaataatccagaagtagcagaaacagggtggagaggaacaaaagttataaagagaaaaaggaaacttacactaaaattgtaagcttaaatccaaccatgtgaataatttcattaaatgtaaatgaactaagcacatatattaaacacagagtttgtcacactgagaaaaataaaaaacaagagacaagcatgcgattctataataaactctaaatagaagtatatacacaaaagtaaaatgataacacaaataaacacctagttaaaatggcataaagcattacttcaatgttaattgcatcattctgattttctaaattgcatattgtgttgtaagatgccacttttgaggaaaactggttgaagtgtaactaaacctttattacatattttttcaccttaatgtgtatctataattatgtttacagaaaacattaaatgaaagtaaaaggatggaaaagttttatcatgtaatcctgaattaataacacaaacatatagtgtggatatttctttgcgtttcttttttgttgttgtcgttgttttttgaaaaagtctcattctgttgcccagactggagtgcagtggcacaatctcggttcactgcaacctctgcctcccagattcaagtgattctcctgcctcagcctcctgagtagccgggatacaggcgcccgccaccacacccagctaatttttgtatttttagtagagatggggttttgccatgtgggcgaggttggtctcgaacttctgacctcaggtgatgtgttcacctcggcctcccaaagagctggaattacaggcataagccacaacgcctggcctttttttgttttgttttgtttttgagacagtgtctcactctgttgcccaggctggagtgcagtggtgcaatcatggctcactgcagcctcaaactcccaggctcaagcaatcctcccacctcagcttcacaagtagctaagcctacgggcacgcaccaccatgcctggctaattttgcttattttttgtagagacaagatctcactatgttgcccaggctggtctgtaactactgggctcaactgatcctcctgctttggcctcccaaattgctggaattacaggcataagccaccacacctggcccagtatggataattcatgggtaaaaaatgtaatacttgaaaaacaaattagatgttttcttattatttccacatagcagagtactaactgtaggacattgggatgtacttttgaataagaaatgaaggtttaaaaaaagataaaataaaacaaaataagtgcctaaaactgactggtgaggggtttacccaatgcatgagcagtagaaagaatttaattttttgcatccaggatactaaaaagtggaaagatagatttcttttttttcctgttttacttcttttgggttgctctatttgatctaattaaaaagcctattactcctatgctatgctgatggaagagaagtcttctctaacttagtcccagtgagattgcctcctctgggccaacaatgctcatctagaacttggaatttcgataaatccattctgaggtgatgagcagcagcagcaccagaaaagttgatccaggccatctaggaccctccagggaagggctcaggcctgtcaaagaggcctgatagaaactggggcctgcagtcagtcagggacattgaagctctcctgacacggtcccaccagctgggaaaacactcggggtctccctcgggtttgatcagatggcaagttccccattccctgattggcccaaagctttgacctgttggacccggggcctatcaaaggccaggtgtcctctccccattggaaacctccctaggctcaactcttctcttctcattctcctgctggcctgggagcatccaggccaaggggtgaggtggggacagccctacattaagtttttatttcaaggtagaaaatctgtccccttgattgtttgggaaactataaaaagactagggcagctcagggtctaaaatacagcttcagggagtacagagttagagtgcagaaacttcaattccatttactctctagcaatttacctaatatcaaaacatacagttatgttatgtttacaaatatgcacgcacctctattaatatgtgttcataagtacatacacatgcaccattacgtttacacatacatgcatgtaacaccaactgatgtaaaaatcattgttttatgtactcagttttcctttgagtttaccctcttttctctactttttaaaatatttatttctaatttggggagctactaactgagattatttttcatctcactgaaaaacagttttagaatttcctgtagagcagttctgctggtggcaaattccatcgggttttgtctgaaaagtagccattttctcctattttttctgtttattatatagaaagataacttatataaagtaaaattcacaggtcttaattatacagtttgatggtttttacaaatgcagatgctcatgtagccaacagtccgatccattctcacaacatctccattactgcagaatggagacattctgttccagtcaatgtaaattatcccattacacctaccaaatagaacgtgtatgagagacacctttctcctgaggacttttgcaaagtggggtggatcatgtgtcccgctcccactgaaaagggctaaatggaaaactaaagtctgaaataaaataggaggctgccctgacgaggggtcccactttgcccttggacagagaacaggccgtggtcaaggccctggtccgggcagaagcctctgtcaggacccactggcatctggtcacagacacgatggacctgggcctaggcagaagggggtgctgttggtctgctgctgagggctctgtgggtttctcagctgggaaaccaaacacttgaacttggtctccacgcagggttcactggggccagcagctgggctctctctgcacccttggagagcctcaggccaggcccagcccaggtaacccctcccagaaatgtcaccccaccactgggactgacactcaggcacacggagtgatttggttgggcagaggaagaggagcacatttgcatgaagggcccctctctctcctctgggactacagggtgggtaagaaatacctgcaactgtcagcctcagcagagctctggggagtctgcaccatggcttggaccccactcctcttcctcaccctcctcctccactgcacaggtcaggatggccctcagcaccctgacctccagctcactgataccacctcccaaacttatgccaggaatgtccttccctcttttcttgactccagccggtaatgggtgtctgtgttttcagggtctctctcccagcttgtgctgactcaatcgccctctgcctctgcctccctgggagcctcggtcaagctcacctgcactctgagcagtgggcacagcagctacgccatcgcatggcatcagcagcagccagagaagggccctcggtacttgatgaagcttaacagtgatggcagccacagcaagggggacgggatccctgatcgcttctcaggctccagctctggggctgagcgctacctcaccatctccagcctccagtctgaggatgaggctgactattactgtcagacctggggcactggcattcacacagtgacacaggcagatgaggaagtgggacagaaacctcagcctgctcagggtcttgttatatgacaagttttaaattttcaaatatgttttatatgtacacactccacttggaagcaccgtctggtttaaaatgtttctactctcaatttctcattcaagttttctgaagtctcaggaaaactaaaaacagaaacaaaaatatcatgatgactatgaaatattacctaattttccaaatatgctgaattcagtgcctgtggagctaaccattttctcttgacagaagaaaaatgagccttagaaattgtttccaaatcctgaaagagtcatcattccatgtactcaggacagatttagagagtgctgaccctgccctttgaaagatgttatttgcctcttagtgcccaaataaggaaggataattaggaatcagaagcctacctagggctcccctctctcctctcaaaattgcacttggtgtcatattgccctagaatttatgcctggtgctggcaaatatttttaaatttattttttaatcttttccttttctgcaatcaaatttcttgaggggctgagaagaagaaataggcccagagagaagcaaggcagtctgggtgcaggctctagacagcccagggagaagaaagagggagcagctccctgtgtcctggagggagccctgtccccattgggcttcctgctctgatgtcccctagtggaggctcctcagggagtccagcctcccagaactgccctataaacctcacagtgagctaagcaagtatatccaggaaggagggtctgtggagatgtgagactaaggtgtgttatggcctaaacactgcccatctccatccttcttggggatgacaaagtgaacagtggaggagacaggatacatgggtgcatctggacctcaagcagtaggctgttctgtggtctgtccctaaatcttgtgctggagaccccatacgagagccactccctgaccctgggctggagccctctaccccctgctcacaagaccagcagctgtttccttataggcccccagggagccacagaacagcatcaaccaagaccatcctcttcatgtgtcagcttttcagggagggatcgaagtcatggcccaggaaagggcttggacagcccaggggaggaggctggttggtatgaaggatgccctcctcaccctgagctgctggagggagtacaagggacttggagagcccaggctcagttgatgatcctcaggatgtagagctatgtatgggtctccactgtggtctctcccccgccttctccttcactgcacaggtggctagggctcagtgtcagggctggtgatcaaaagaccaaggtttatgcatgtgtctctgtccactgacccacctctcaccctgtgtctgtcttaatgtccagcgtcctgagcccagcctgtgctgacccagccacctgcagtgcatgcatctgtggggcaggtgggtaccagctcctgcactagaagcagcagcaatgttgggcacgggcatgtgctctggtacaaacatgcctccgagagacccagagctccacatatataaaagcagtcattgacccttaggggcataggcccaatgctgaggctccaggttggagaacatggcctctctgagcatctctggactccaggcagaggaaaaggctgatttttattctcagcttgggacacaagcaccaaggctcaggcagtacttcaggccagtggggaagtgggagaaaaagctgctgcccatccagcaatggagcttctctgtgcagcccccacttcttgggcaagtcagctgattaacgttgcttttcatttgtttagtaaaaatttagattttaaaactcactccagtgaacgcagtgtggagaatgtgtttctgtcctctcaattctaccctcacacccaacccttggcagtaacaaattgtcgtattgtctcatattaagagaaatccctcaataccaagatcaggctgtcctggaaaccaaatccataatgggtcaaaacaggaccagggtcattgtgtctgactcaggatagtcgactcccaaaggtctgtttatccacctcattcactgagaagctactatgcaccagcctcagatccagggattcaaggtacatgatgaacaagagaggaaggggccctgtcctcatggagctgacactgagtggtggaacagataaggcaatcaagtaaaaatgtcaatgcgacaatatgatgtcatcacacagtgaggagagctcagttgggggtagaggagccatcagaaggttgggcaaggaagacacaggatctgactcaagtttatgaagaaaagtccagatgcctcaaagaagatgaacaaggagacagcaagcatgaaggccacggggccagttggggtcattggagagaaaggtcaggtctagcctgtgtttgtaagaggagggactgaagcctgggtgaggagagagggctcaggaatagccttggaaagtggagggagtggatgcgaaacccctgctgagggggcctccatgagcaatgaggctgggggaggccctgagctaatcaccatgatggaaactcagacaacagcctcccagcctctttcaaagttgtcacaggacgcttttctctccaaatggcaaggggggaatcccactatgagttttatttgagatgtctcttctccatgtcctgtcctgtccctaggctaaattcccatgcgcaaacaagatactgctcagtctcaggtatcacattcacacacaaatgctccagaatgagggaatgcactctgaccaacccaccaggaatttttgcctttgagaatactagatcagatcactcacaccatctcccctgacaccatcatgttgaccagtgggttgtctgatcggtttggacagcagaatgcagatgcctgtagttgcagctggggtcagtcacatgctcatctcatggctgggagactttgggtccagacaacaggaaaaaaaggaggtttgcctacgtgatcccacaatgtgcatcactctgtcatccactcccatccttagttcatgttgggttttgtcctgtagatgctgggacctggacaggatcacaagccaggcgatttctggctcacaaagttacagctcaagctccctgatgttgctgacattcttcccacagaccaattttagacagacacactattgccatgcaggcactgacctgagatacaggtagtctcaggagagggaggaagcagatacacatccccatgatggcctccttgtcccagagtgggtaagaaaggcaaggaggccaggaagccacaggagtggccactgcccaccacctgtgcacctgtccctccctcaggtgagaagcagcctgagggtccagcacctgcaccttttcccagtgcccacacacttccaagtggggcctccttctgctcacctcccaaagctactgctttccgggacatctgtgtcattgctgagagtctacttttcatggggcccttgtcccagtggtctgggatcagtgtcagcctgtttaattcagcactgtctctgtcctttcaggacaccaatctagctattaaagctctaattgaattctcctttttttgccctgaaactttagactctccttctcagtgtctctctagaatattttgtctctatccaataagatcaagttatgtcttcaggcctacagccacttctttccccaaattctgcaccttcttttaagttcttattccctcttatggcttattttccactaactagctaatgatgccaaaacatttatctattttacctccttcaggaataaaaaagaaaagcatttatcaatagcccattgtcacaaagaaaggaacagaggagagatatcttctagaaaaatacaggtgaacaaggaaaaagttttaattcctcataggaactactccatgatccaagaaaataaattccagagattcaagagttcactccttagaaacaacagtgtaaatacaaggtagtaaattttcttggttttctcaatgaataacctcaaaagggttagagtatgattataataaaaagattatacattactttcaaaaatgtaagatgaacatgtcaaaaattttaatcgactcatatttctgaaaagaccagtaaaatggtgaataattttaaagaacattttaaaacacacagagtttctattccacgagggcaggacctgtgaggataatttcctgtgttagagaaacactgtcctaaacaacaatagtagaactctctaagctctgaatttatcttctcctgtaagaaaaaatctacaaagtgacaggatccaatttatataaaatatctagcaaagattttggacattcccatctcacacctcctctccaggctctcctcaagtgaaatctactctccttctgcccgtgttctcacctttctgcacgcttccgcctgctgacacatggcttctcctgctttcctttccagtagccctaacagatcaggccctgccagtaagtaagctcctggcctgagggaaccacatcgcatgttactggatttctgaggcacttgccctgccagggtctctctttctgaatcacaatccctgtattcctgggaattctcttctcctggattctgttattcagctctgtgtttctccctccatatctactttgtgaatttctctacatcttcacctgaatcccaggaagcctaaggacatgctgatgcttcctcagttctcatgtcacaccctgttccctcctcctctatgatcccaccaggtcatcctgcatcagaaccctgagtgcggcagaggcttctctggcctccttacccccagtggcagaagggaggaagggaggtcccctgtggcctcccatccttgtgctcccattagggtcagcatgaagcaggaatgaggctgtctatatcatcatggcattcccaacactaaactctgtgcccaggagaaggtaggcactcaataactatttgacaattgaagaactgcctctcaccacactggccacattgtactggactcaggatggggctgaactggaagagtcagctgtgaacctgctcttgtctctgccctcagcctgagagctgaaggggaacctaacagggagagcacccatgggcagggaaggtacattagtagcctcatcctgtttgtgaggctctgctcagccttgggaatccctgtttattcaaggcagagaagaaggaaaacaattaaccaggcctggccaacaggcagcatctacaaggcgatgagttgagggccagatggtcagagttggttctggcatctctcaggcgcctctctccatgttgcccttttttgcgatccaggggtgaggtttcaccccactgagcccccacccatctagatgggctctgctgagagaaaaacccattttctagatgagcccactgaggctcaaggggcacatgtacttggtgatgcaccttcttcctttagagactggtcagcctagaacaccccctctcgagtggccttctggtccctcatctgcccagccccacccagatctccatgaacctgagctgtgtgagagaagagggaagagtaggaggaagggaggagtccaggccatggtgtggatgttgcaggaacccctgggtcttcaaactgaggctggacaccgcaatgttctttttatctccctcaaattttttggtaaaatgtcagtgcttgtctggtccattattcaaacctgattctttttaccaccatcataggcatacatttctgagtcttcatcccagagaacagctcctctctaaaggggaggtgtagggtggctgtgagttctgagtttgcccctggggaggaagcacctgctccaccatgtgcacaggcctgtaagcaagagtccaactttgttgaaataggaaccatttgagtttgcttcaggccttgctgacctcagaagtttcacattgtcccctggtgacctcttcacaatgatgttagtggtgatggaacaatgcaggacagaaggccttccttactttctttcaacaaaaaaatggtgtattatctagcctgacagtaccctagctggagacagtgaaaataatttacattttaaacaaataatgtttgttattttttcaatctcatgagtgtaagataaaagtaatcctatctcaataccaaaacaaacaaacacgaaaaaccagaatctgaggagactgaagtgtgttgattgagagacagtaagaataacttagtccagctcccctgcctggctgtgaaatccaatgatccagtgtcccactctacagacaaacctacaggtttttcacccaatgcagacagaagacatggtattgaattcatgagtccccgctgagagtcacaataggctggtgtggcacaatgcattatgggaggcacagaatgaagggacaacatgtattcagtggattctgctctcttatcagactgagtcactgcacagactgctcacagggtttctccactgcattctgcctcacataaataaacaccaagagccataggatattagtcaattatattttctccttcagtgtcatacttgagatctctatcatatttgaaattggactcagagagcttcaattattttgttgcaatatatattatctttacaaaaattacctagactactgtgtttctgaaaaataaatcttacaatttattttacttccatgatggtattaaacttgaatggttagcatatcagccagtagtgtgtctggggctggacaacagagagtgtttggggtccattcctgaagggtgtgtgtgtgctcagagctggcatcatccacctattctgactcctgccctctgctaagtcctcacagctgtgaacttccaaacccctgggacaacacagctccactcctgctcattcccctgatccccaaaggcacagggccctgatcctgacccaaacacagagtgggatcaaaaagctgagaggttgtcacttgcataggtggatttttttcctcaaagagtataaagagagggagaaagattgggagaagctctgcggtagctgtaggcacagaaggcaggaatcaggccaatctccaccatggactggtcccctctcctcctcatactcctcactcactgtacaggtgactagacacaggcccaggggaggagccctgggaagcccaagggactctgctttctcatcttgtctctagaacagtatcaccacttctgtgtctcttccacttccagggtcctgggccaagtctgtgctgactcaacctccatcagtggcaggggccccaagatagagggtcactatctcctgcactggaagtgccaccagcactgggggtggttttcatgttaatgagtactagcagctcccaggaatggctccatagctcctcatttgtgaaaacagccattggccttcagggttctgtcctggttcacaggcttcgctgagcatttctgggctccagtctggggataaggctgactatttttctttatcttggcacacaagcattaatgctcacacagaactgtaggccaccggggaaggaagacaaagatatgctgtctttccagtgacagagtttccctgtgcagcccccaacccattcaccaaataagtgcttaactgtgattttttttggtggacaaaatgtggagtatgagaagcactgaagcaaacatggtctaaataatgtttcccagtcctctctcaattctacccccatatccaacccttggcaataataaattgtcatactgtcatatattgaaataaatatctatattagtccattctcacattgctataaagaactacctgagacagggtaatttatgaagaaaggctcacagtctttaattgactcacagttctgcaggctgtacaggaagcatgaattggaggcctcaggaaacttacaatcatggaggaaggacgaggggagcaagtacatcttgatatggcagagcaggagagagagagaaggggaaatactacgcacttttaaacaaccagaactcacaagaactcactcatgatagtgaatcttaagaacagcaagaaagaaatctgcccccacgatccaatcacctcctaccagcccctcctcagcatgagatttgggtggggacacagagccaagccatatcaattcctcaataccagggtcaggcttccctgggaaccaagtccatcatggatcaggacaggaccaggaacacagcacccactgtgtctgaccaaagagcctcaactgccagatgtctgtccatccacaccattcaattagcacctactatgtgccagccttaggtctaggggctcaaaaacagggtggacaagacaggaagtgtccctgtcctcatggaccagacaccatctggtggaagagatgagacaattgagtaataatatcaatacaataagatgtcatcacttagtgaggagaggagaggagagctcagtaatggtggtagaggagccatcagagggttggacaaggaagacagaggatctgagctaagtttgtgaagaaaagtccagatgcctcagacaagatggacaaggaggtgggaagcatgatggctgtgggtccaactagggtcactgggggagactgtttatacccagcatatgtttgtggggaggagggactgaagcctgggtgaggggagagggctcaaggctggccttaggacatggacaggatggtattgagtcacgctgcagaaggagccttcatgggcaagggggctgggggaggccctgagctcattattccaatggaaatatcaaactgcctgttagcctttgtcaaaggtatcaaagagactttttcattcaagatggcaagagaggaatctccctcttagacttctttgagatattctttcttcatgaccgtttcttgcccctggatgaatgctcacatgggagcaaattacctcctcagtcccaggatttcaatttgcacacaatccccccagaatgatcgagacctgccatccctgacccactgatcaggaattctggccttcaggacaacttgaccagatcagtcacaccatgtcccctgacaccatcgtggtgactggggtgaactgtcagactggtttgggtaatacatgtcctgtccctggagttgcagaacctgttcagaaagataatggtgtggatggagggaggctaattccagccacatcagaaagcaagaaagacatggagaccacccttgagctggcacagcatccttgggtctcacatgtgtctctagcgactggaaaaggaactcagatttaactaattctattttctcatctgtcactctccctttcactactgactcctgaagccccaacaaaagcagcactatgggattatggtcatggaatagaggccttgctgctgaacttttcttttttattctaaaaagtacaacacagataatgcatattaactaaaaattataaaaatgtatttaaatgatgtgacaatgaatgtataaggggttaataggagaaaataataaacaatgttaaaaaatacaaaataccaatacactataagagttatactatgtcatggattgtataaatcagtattgtaaagatggcagtgtcctaggattaatccatcaaattaatataagtgtaattaaaatttcagtaatattttaggaaactgcttaacttattttaaaactcaaattgaaaattgagataaaaattacctaagattatttaccaaaaatttgtaatggaagtgataccagatattgagttatttgaccaagcaatattagctaaaatcatgcatgattgagatcttgacatttacataattctcttaaaaattagagtagataggactgatgattttttatgtgaccttggaaatatggctaactctgttcataaaattaagtagagtacctaattcatacttttattaaaaaatccaaacagatttaaaatataatttagaaaagaaaaagtttaaaaactttagtttggaaaaatagaaatattatttttatttcatatgagaaagtacttcttaaataaacccaaaagtcaattcataaaagaaaatttgaagtatttggttgcaattatttgaagctttttttttcccaaagaggaccacagttggtaaaaagagagaaggatatgcaagagtggaaagacattggcaaggacaaagtattgctgtttgcatccagaagacaactttgaaatgagcgaagacagaaaaaaaggaaacccagtaaaaatgttcaaaggacacaaacaagccattcacgggtctcaaaatgagagcagataaatgtgacatcaaaatatgttaaattccaccagagacaaagagaagggaataagatcttcaagtagaaattgtggaatgagccaagcatgtctgtgcatggggagctttccaggccttgcaaaaagcaaagagagtaagaaaagagcaagaagggagtgagaagcccttttgtagagaaaccaagaaaagaaagtttagagtgttagagcctgggccagaaagataaaagagagagaagaggtagataatgtgggatttgagtgacctttgattcctgtgggcatacttctgagtaagacatgaagccactgagggtggaaagctgttaaatgatattgcaaatttaaataaaaaaaaaagatgccagtgaggatgtggggaatcccaaactctcactcacagcaggttgtaaaaacaaattcagctattttgagcaaagtccctcagcacgaagataccttaagagggtgagcatctgtcttgcaccaagtccactctgtacagagacacaaggaaatgtttatgagaaggtccttactaggggaaaagtataaaaaacaagctagttgtcaaacacaaggggaatttataacctgcagttagctgatggaatgctaactagttggaagtaataaaataaaagtattattatgagtttcaaaggcaataaatatataaataaaattaaaaagccaagagctaaagaaataaattattttaaaatatgaacatgcactataattttttttaagtttataccatgagctatttgaaagttagactggaagcacattatatacacttatgtaagagcctctgaaaaagatggaaacacatacgaaggttaaaagataatttaaaacaatagagagttatttcagtagctgaagatatgagtgccaataaaatgaatgcgattcaaccctgtgagcattgctttcataaaaaaattaaaacagaaaatgaatattaatagatgacttaagtgaaatcacaatgtatgtggtgatacagctgaaagacaaacgttttgttagtaagaagggcatcgctaagcctgatgagtgctttgtttagaattcccagctaccctggattcctctccaacctcatgaacagcttcagaaaagaggatcaggacaaccgatgctcctctcattgaaatgcccggatgtggcagagaggcaggaaatattttgggtctgaggacagtgaggatcatcactgagatgatcctgcccaaatgaaaaccactcagggcctccaagggagttcagccatcagctcactggactaggtttgggatgcaacactgacctgccccgacccagagtcataatgagccaggccacctccacccactgggtcagctcatctcctctttatcttttctccttctgacctgtgagtacccagatcagggtggacaagtaagagacacatagcaaggtcttatgtgaatacagtgactctaccttacgacgtttttgggagatacaaaggtacttagaggagctcagtttccaaagcagtgctccaggaagctggaaatctgcactatgctctgggctcctctcctccatctccaccctcactattcaggtgagaaagaaccttatgtcgggggatccacacccagctctgctccataccccctcactctctggctcactgggttgtaaacctgctctcatggccctctctgtccccctgcagtgtctgtggcccaggcagggcagactcagcagctctctgtatccaagggcttgggatagacaaccacactcacctgcactggggacagcaacaatgttggcaaagatggagctgtctggccgcagcagcaccagggccatgcccccaaacacctgatcaacaggaaaaacagccaactctcagggatctcagagagattccctggctcccggttaggaacatggcatctctgaccatctctggcctccagaccaaggacaagcctgcctattactgctcagcctgggacagcagcctcagtgctcacacagcgcctcaggggaagtgagacgaaaactcaggagctcccctagcttcactcggtatgcgggggcgtcatagagcactgtttaaactaaaccaaaaatgacaagggctggtttccacgtgacaaagtgtgtgctattcaaaactattaaaaataatatcataagttaaaataactaaatctgcagtattaatgaatatttataggaaacattgttgtgaatatatttgtggctagatacttacatgaacatacacatgcattaatcagtagtaaaaatgaatgcaagggtaaactaaggaaatatttattttcccagattttccttctcttttatttggagatgctggactaaatgctcagaggttccggtggtctgcctttgagtgtgtgttcagcagggtcacctcaagcttatcccaccttcttatgacctgggcccatgcctgtcctctcattagaatcccctttccctctgtcacagagctctctttattccttctacagacccagacttgttcctcacacttagttgaggcttcctgggccccacgtccctgtttgcccccaacacccacacaagacaatgatcccatgtgtgtgctcttgttgtgccctttccttatcctctgacatacctcaggcagtatctggaaagaacaaatgaagtgggagcgttagcttgtagttgaaaatgatttttgatattttggggaaaatatctggtttaaagatagttttccatcgagataaaaatgcatgtgtgacagcaccacatttctaatggcggaccaaagccccccacatctttgccccccacatggctccagggacattgacttgttaatatacaacccaggagagagcactgtgtcctatgcaactgcaatgcagaggcaggtttctgcccgctcctccaatgaagtgagtagcaaccccaaccccatcttcacccatcatttagatgacccccatacaaccacaacatagaaacacattgatcaaagggcctttttctctttgcagagacccctatttgtttatttggcatgtgagattttagacttttaccaacaattaaaatatactttattagaaaagttacacttcttaagaaactctgattcttactgtgaagttaatacctaatgcatcctataagcatagtaagtggaaaattgttctgtaaggagaagattaatcaatgaaataaaatacaagtatttgagagcaatctaataggtaaaagattagaggacataattgtgaatgccaggtgcaatataaaggaaatgtgggccgggcatggtggctcaaccctgtaatcccagcactttgggaggccgaggtgggcggatcacctgaggtcaggagctcgacaccagcctggccaacatggagaaaccccatctctactaaatatacaaaaattagccaggtgtggtggtgcatgcttgtagtcccagctactcaggaggctaagggaggagaatcacttgaacccaggaggcggaggttgcagtgagccaagatcacactattgcactttggcctgggtgacagagtgaggctcagcctaaaataaaataaaataaaataaaacaaaggaaatgtgaatacctagagttgattaaattgtggcccctcaccttcaacactcgaaaagctcagagtgggtagaaaagcttgttgagttatcttctgatgtcattgacaagataaatcagggacaatagaaggaatatgtggaaagaggtgccagaggctagaggggaaagtgtgaagtagccagcagagaggagcctgctggctgactacttgtgttagtagtagcaggtggtgttgacgccatctcccaggggaaaaccctgggaaacaggaaagctaaaagcaggctcaccatcctcatccctaacagaaccactgaagtgagcacaccagagtgtggggttccctcccggctcttcagatgacattgttatttggcaccaagctgatgttagtatgttctttataaatatatattgcacaaagaattgcataaaaccttcaataatttaatgaggactttctcacttaaaaaggtttttatgtctcttctgtggcccccataggtagccggggatccctcactgcatttcagtctgacaactcatcacatggacagagtccaccgtgtgtgactgtgtgtctgtgataataggtggcaaagcttcactgtcatagccgcacctgcttcattgcctggtgcttgcctttctgaaataggaaaataaactcttaccaatgtgtcataattaggttctatttaaaatctcctaccaaagttaagagcagcctgcacaactggtccacaaaatgagaaacctccaatttatttggactcttttctctaccctacccagtgatccaactggtcaccagccatgtggattctctctccaaaacgcttttaaattcaactctcctgtttactttccattctcatgtcttatgtcaaatattcatgtcacttacctagttctgatcagttctctggctccatggacagctcccccaactctgccttcctgaccatctctgggctgcggattggagatgaggctgacttctcctgtcagtctcatgatgaaagctacaatctcacagtgctgcaggcccattgggcagtgacaggaaaactccccagagcaccctcaccctgagtctgccatcagcctctccccaccagcatgggttgctttttcctgtcccctgtttgaatgtttgaattcaaattttctgtttatgtgtctctctattttctttccaaaatacacaactttttctttcttgtcttcatggatggtttttctggtccctgtgaaattactttatgaagaatatttagtttaaaacatagtttctgaacattgtcattttaacattgtgcactgggtcattcattgtgtgaggggggctgttctgttcatggttggacatttataagattattgggactcacacatcagatgcctatagcaccctaattcccaaattctaacaaacaagcaaaaaatgtagacattgcaaaatatcctagggagacagcactgcagaatcacccttgtctgagaaccactggattaaaaggacatggtttcacgtattgggcagccttttgtgttgaaccctccttatcccattccactgaatataaggctacatgcattatatctcgatggttccaaatttcctcttaaacaaatgtgtgggatacaactccaaaggttatgttgacagatgaataatcctctgaacaccattagttcagaaaacctgctacccaatgtacagcatctcttgctgaccagagtgtggagtgaaacatttgaccaaactgtgtgcataattgctaattcaaatttttaggtaaaacacctaaaacataacacattcttctctacttatcctcttaggggttgcttttcaagcatggtgtacaaaattatgacaaggcctcgtatgtgtggagtttacattttagaatgggtagacgacagtagacaagagcagcctcagaactgagcagtcagtgaagtcctttttttagccctagcgctggatgcaaattttaccagctgccatttgtgtttttgggcttgctccacccagtacagtccccatgaactgcatgttgatatgtatatttcaaagttaattaattaaaactaaataaactttaaaaaatattcctcagccacaccagcttcatttcacctgcctcctggactcatgctctccatccatggctctcatgctggagagttcagacacagggcatctccaccatggcataaagttctactgcagagcacagtctgtgacaatctatttaacacttccttaggccagtttcttcattacctgtaatggggatatagtaacactcaagttctcttcacagtctggaacactattctctgtgggagtattacctcggccccttcttcctacagaacggaggagtgataatgtaactagtattggccaataagatgaacagaaatgagaggtgtaatttctgagcagtagatgtaagattagcctgtgctttgtcaagttctatcatctctgacgtaacacccacagtgttctcacagaattctctcaaccatcctgcatcctgggatgaaggtgaagtgaactgaagccccaagcatttcaatcagagatgggaatggtggaggagtgagaaatatacattcgttgtgagtcaccaagatttctgtcaatttctcactgcatccaagcctagccagtactgagtgctatggaaattataagtgaatgtggggagccacaatgacaaaattaacatctatctataaatatatataatatatattaattacattatatcatatactaatattaatatataataaatatataatatataacacttacatattatataagtatataatatataacacttacatattatataagtatataatatacaataattaatctatattacatataatatattaatataaatatatatacataatttgatttgatgcaatactgtgaacatttagtagactacggagattgcatgatgtttcattttattcactggcaaatatttaattaagctgtcaccataataaacattaaaacacacagaattgacaaaataattctcctgagctgtggatatacaagttagacaactgattagaagcataggttcactcctgtgccatttgtggaatttttacaacttatttactttaagtgatgattttaagcataattggtttttgttcttgctttttatttattcaagcagaagaaagacacaagaatgataacccacatacatacagagtagtagaatggcaagagctaattattctcaaacacaaattcttaaagataaatgtaaaatatttgaattaaacattttgctatccaaaaaaaggtatgccgtttttttcctgagtactccagggcaggaaagtatattcatcaatccccctggtgtccgctttcttaacacattgttcatattggtatatatttttttcttattacttaacttactcatcctatatattgtgtttcctaaatatatttcaaattcattctcagccttgtgatttccctcgccctcattatgtcccatgtcctgctggggctcccccataccacccctctcctcatctgtaatgccccctcccagttcctgccctcctgggaactgctgtgctcttttctgccctgagccttgttacctccttcttgtactacctatttgtctcagtgagctcctcttccattcttcaaaggctccagagccctagagaagagcatcatctcaaaaaatttcccaagaagctgcaagtaatgagagtgtctaagaccactctttctgctttatggcaattttatatttaacgtggtattgagtcttgctgaattttcagtctgaagtcataatgtgctcaaatatacaaattccagagacacagagcagaatggtggctgccaggagctgaggggaggaggaaatggggagttgctggtcaacaggtgtaaagttttagttatgcaagaatatgttataaagatgtgctgtgcaacacttatctaaatattaattattaatcaaacaaaaaattcaaaattattaacacacatttccccctgggtttactggacagatgattttatatttgtctctgctaagtagactaaggtgtaaggatttggcacgaaagttgtaaaccacaaacccagccaaaaacaaaatattctttatacagtttttcaataaataaaattaatttaatattgctagtttaataaaatagctgtgtcttctaagttatagataaattttgcatatttttcactttaaggatcttacttaggtaaacaactgcatataccaactactaatattactaagaaaaaatgatttagagaaataaaaataattttcttgtgtctcagttttcacatataatctaaataaatttttaagtaactaaattagatgaatataaatgaagtaaacacttctatctaaactttttgtataatttaaaatcttaaaaaataaattaaataataggtactcttaaaaaagtgtaggtcatttaaaattaaaaatatatattttggatatagttataaaaatattaaaatagttctcatgtataaaagatgaatttatgagagacaattcaaagtttcttacatcctaggttttgagtaaaaattattgttaaaataattaaaaattctaattaatatataattcaatatataaaataagacaaaaataaaaatactaaatatatgtttttaagttaaaaaagcaaagtcataaaatatatgctttattaaaataattttgccaagttaagatgttatataatggttacttataaagcaatataaaataaattagagagatataaaatattataaatatagatatctttttgtaaaaaacattagaacataattttatattgaacaatcttatataatttttgtcctaaaataagatgatttactattttaagaagacaaatcaaaatgtcccaacaagtcttagtctatgtaaattataataaaatacatttgggaattatgtcccaacatatcttactctatgtaaattatagtaaaatacatttgggaattatttaataaaattaagtataattaacaggactataattttaaaaattatgtcttcctaaatattaaactttaatattgaaaatacacaaatacaaaactgaatattttgattttctatgtccaaacacagttttcttaatattaatttactctaaataaaagatttaaacattgatttttaattttaacatctatttctctttaaaacttctcaaaattacacttcaaaagttcaaattttgttaatattttcacacataatttacagacttttattgtcatacctttcaaaaaaatgtaatttttttacttcactgggacaataactcttttctttaacctttttttaaattattatactttaagttttagggtacatgtgcacaacgtgcaggtttgttacataggtatacatgtgctatgttggtttgctgcacccatcaattcctcatttatattaggtatttctcctaatgctatctctcccccagccccccacccccaaacaagccctggtgtgtgatgttccctgccctgtgtccatgtgttctccttgttcaactcccacttatgagtgagaacatgcggtgtttggttttctgtccttgtgacagtttgcttagaatgatggcttccagcttcatccatgtcactacaaaggacatgaactcatccttttttatggctgcatagtattccatggtgcatatatgccacattttcttaatccagtctatcagtgatggacatttgggttggttccaagtctttgctattgtgaatagtgccataataaacacacatgtgcatgtgtctttatagtagcatgattcataatcctttgggtacatacccagtaatgggatggctgagtcaaatggtatttctagttctagatccttgaggaatcaccacactgtcttccacaatggttgaactagtttacagtcccaccaacagtgtaaaagcgttcctatttctccacatcctctccagcatctgttgtttcctaactttttaatgatcaacattctaactggtgtgaaatggtatctcattgtggttttgatttgtatttatctgatgaccagtgatgatgagcattttttcatgtctgttggctgcataaatgtcttattttgagaagtgtttgttcatatcttttacccacttttcaatggggttgtttgctttttcttgtaaatttgtttaagttctttgtagattctggatattagccctttgtcaggtgggtagattgcaaagattttctcccattctgtaggttgcctgttcactctgataatagcttcttttgctgtgcagaagctctttagtttaattagatcccacttgtcaattttggcttttgttgccattgcttttggtattttagtcatgaagtctttgcccatgccaatgtcctgaatggtattgcctaggttttcttctagggttttttatggtgttaggtctttttttttttttttttctttgagacagagtctcgctctgtagcccaggctggagtacagtggtgtgatctcggctcactgcaagctccgcctcccgggttcctgcattctcttgcctcagcctcccaagtagctgggactacaggcacctgccactgcgcctggctaatttttttttgtattttttaatagagacgtggtttcaccgtgttacccaggatggtctcgatctcctgaccttgtgatctgcccgcctcggcctcccaaagtgctgggattacaggcgtgagccaccgtgcccggccatggtgttaggtcttcattcaagtctttaatccatcttgagttaatttttgtatactgtgtaaggaagacatccagtttcagctttctacatatggctagccagttttcccagcaccatttattaaagggggaatcctttcctcattgctttttttagtcaggtttgtcaaaaatcagatgattgtagatgcgtggtgttatttctgaggcctctgttctgttccattcgtctatatatatgttttggtaccagtaccatgctgttttggttactgtagacttgtagtatagtttgaagtcaggtagcatgatgcctccagctttgttctttttgcttaggattgtcttggctatgcaggctctttttaggttccatatgaactttaaagtagttttttccaattctgtgaagaaagtcagtggtagcttgatggggatagcattgaatctataaattaccttgggcagtatggccattttcatgatattggttattcttatctatgagcatggaatgttcttccatttgtttgtgtccccttttatttcatcgagcagtggtttgtagttctccttgaagaggtccttcacattccttgtaagttggattcctaggtattttattctctttgtattaattgtgagtgggagttcactcatgatttggctctctgttagtctactattggtgtataggaatgcttgtgatttttgcacattgattttgtatcctgtgaccttactgaagttgctaattagcttatggagattttgggctgagatgatggggttttccaaatatacaatcttgtcatctgcaaacggagacaatttgacttcgtcttttcccagttgaataccctttatttctttctcttgcctgattgctctagccagaacttccaacactgtgttgaataggagagggcatccttgtcttgtgctggttttcaaacagaatgcttccagtttttgcccattcagtatgatattggctgtgggtttgtcataaatagctcttattattttgagatatattccatcaatacctagtttattgagagtttttagcatgaagggctgttgaattttgtcgaaggccttttctgcatctattgaggtaatcatgtggtttttgtcgctggttctgtttatgtgatggattacatttattgatttgcatatgttgaaccagccttgcatcctagggatgaagctgacttgatcgtggtggataacctttttgatgtgctgttggatttggtttgccagtattttattgaggattttcgcatcaatgttcatcagggatattggcctaaaattctctttttttgttgtgtctctaccaggctttggtatcaagatgatgctagcctcctaaaatgagttagggaggattccctctttttctattgattgaaatagttttagaaggaatggtaccagctcctctttgtacctctggtagaattcggctgtgagtctgtctggtcctggactttttttggttggtaggctatcaattattgcctcaatttcagaacctgttattggtctattaagagattcagcctcttcctggtttagtcttgggagggtgtatgtgtccaggaatttatccatttcttctagattttctagttttcttgtgtagaggtgcttatagtattctgatggcagtttgtatttctgtgggatgggtggtgatatctcctttatcattttttgttgtgtctatttgattcttctctcttttcttctttattagtgttgctagcggtttatcaattttgttgatcttttcaaaaaaccagctcctggattcattgattttttgaagggttttttgtgtctctatctccttcagttctgctctgatcttagttatgtcttgccttctactagcttttgaatgtgtttgctcttgcttctctaattcttttaattgtgatgttagggtgtcgatttgagatctttcctgctttctcttgttggcatttagtgctataaatttccctctacacactgctttaaacgtgtcccagagattctagtacgttgtgtctttgttctcattggtttcaaataacgtctttatttctgccttcatttcgttatgtacccagtagtcattcaggagcaggtttttcagtttccatgtagttgagtggttttgagtgagtttcttaatcctgagttctagtttgattgcactgtggtccgagagacagttttttgtgatttcttttcttttacatttgctgaggagtgttttactaccaattatgtggtcaattttagaataagtgcgatgtggtgctgagaagaatgcatattctgttgatttggggtgtagagttctgtaggtgtctattaggtctgcatggtccagagctgagctcaagtcctggatatccttgttaaccttctgtctcattgatctgtctaatattgacagtaggatgttaaagccttccattattattgtgtgggagtctaagtctctttgtaggtctctaaggacttgctttatgaatctgggtgctcctgtattgggtgcatatatatttaggatagttagctcttcttgttgaattgatccctttactattatgtagtggctttctttgtctcttttgatctttgttggtttaaagtctgttttatcaaagactaggattgcaacccctgctttttttttgctttccatttgcttggtagatcttcctccatccctttattttgagcctatgtgtgtctttgcacatgagatgggtctcctggatacagcacactgatgggtctgactctttatccaatttgccagtctgtgtcttttaattggggcatttggcccatttacatttaaggttaatattgttgggtttgaatttcatcctgtcattatgatgttagctggttattttgcccgttaatgatgcagtttcttcatagcttcaatggtctttaccatttggcatgtttttgcagtggctggaacctgttgttcctttccatgtttagtacttccttcaggagctcttgtaaggcaggcctagtggtaacaaaatctctcagcatttgcttgcctgtaaaatattttatttctccttcacttattaagcttagtttggctggatatgagattctggtttgaaaattcttttctttaagaatattgaatattggcccccactctcttctggcttgtatggtttctgctgagagatccactgttagtctgatgggcttccatttgtaggtaacctgacctttctctctgggtgcttttaacattttttccttgatttcaaccttggtgaatctgacaattatgtgtcttgggattgctcttcttggggagtatctttgtggtgctctctgtatttcctgaatatgaatgttggcctgccttgctaggttgagtaagttctcctggataatatcctgaagagggttttttttttttgtttttttttttttggttttttttgagacagagtctcccactgtcacccaggttggagtgcagtggtgcgatcttggctcactgcaaactctgcctcctgggttcccaccattctcctgcctcagcctcccgagtagctgggactacaggcacccaccaccattcccggctaatttttcatattttttggtaaagacagggtttcatcatgttagccaggagggtcttgatctcctgacctcatggtctgcccacctcggccttccaaagatctgggattaggaggcatgagccaccgcacctggccctgaagagtgttttctaacttggttccattctccccgtcactctctggtacaacaatcaaacatatatttggtcttttcccgtagtcccatattttttggaggctttgttcatttcttttcactcttttttctctaatcttgtcttctttgtttatttcattaatttgatcttcaatcactgatatcgtttcttccacttgattgaatcggctattgaagcttgtgcatgcgtcacgaagttctcatgccatggttttcagctccatcaggtcatttaaggtcttctctacactgtttgttctagttagccattcgtctaacctttttcaaggtttttagcttccttgcgatgggttagaacatgctcctttagctcagagaagttcgttattaccgaccttctgaagcctacttctgtcaactcgtcaaactcattctctgtccagttttgttcccttgctggcgaggagctgtggtcctttggaggagaagaggcactctgttttttggaattttcagcttgtctgctctggtttctccccatctttatggttttatctacctttggtctttgatgttggtgacctacagatggggttttggtgtagatgtcctttctgttgatgttgatgccattcctttccgtttgttagttttccttctaacagtcagacccctcggctgcaggtctgttggagtttgctggaggtccactccagaccctgattgcctgggtatcaccagcataggctgcagatcagtaaatattgctacctgatacttcctctggaagcttcgtcccagaggggcaccgcctgtttgagacgtctgtcggcccctactgggaggtgtttcccagtcaggttacatgggtgtcagagacccgcttgaggaggcagtctgtccattctcagagctcgaacaccatgttgagagaaccactgctctcttcagagctgtcagacagggacgtttaagtctgcagaagctgtctgctgccttttgttctactatgccctcccccagaggtggaatctacagaggcagtaggccttgctgagctgtggtgggctctgcccagttcatgcttccctgcctctttgtttacactgtgagctactcaagcctcagcaatggcaggtgcccctccccccatcaagctgcagtgtcacaggttgatctcagactgctgcactagtagtgagcaaggctctgtgggcctgggacctgctgagccaggcaacgggagggtatctcctggtctgctggttgctaagactgtgggaaaagcgcagtatttggtcaggagtgtaccatttctcccagtacagtctgtcaggcttcccttggctaggaaaggggaatcccccgaccccttgtgcttcccgggtgaggtgacaccccaccatgcttcagctctttgggttgcacccactgtccaactagtcccaatgagatgaaccaggtacctcagttggaaatgcagaaatcacctgtcttctgcgtcgatctcactgggagctgcagaccagagctgttcctgtttggccatcttggaagagaccttccctgtgtattccgagccttctgcattctgccatcactgcagcctcctcatgttggatggacctgatatttttgcttttctagtaattcagaaatcctcagtggaaaggctgtttattaatatgagttatctccagacagggcaaaggtgtggtctatggatgctgtggattagcaatgaccaggctctcaggtgactccactcatgtgattttcacagaaagactgctgtctggccagtgagcagcacagggcactgtgagtcacactcagtgtctgcacagtgaaaacccaaaacttgccacccccccaaactccccagggctgggtagatggagtctgcactcactgacacagatttagcagctagatatggtcccagcacccccaccttcttccaagtcctgcgtgccagacaccccgacaacagctcccagatactgataaatccatggggagagttgggggtaggcagtgggagcaacacacttgcatccataacccctcctttgtgaggccactgaaggggataagagaggcctggagaagccactccagttctggacctcaggagggctgtgtccactgtgacctgggcacctattctcctgtgatattctatcatttctcaggtagggacaggtctcacgtcctggggaagccccctagcctgagttcttgccctgtgtttcactctcaccctttgtcctgattcctcacccacgatcatctttgcttgcaggttccctctctcagcctttgcttattcagctgccctccctctctgcacatctgagaaatgctataagacttccctgtaccccaagtagtggctgcattgttggaggctgtcacatattcttgtaccagcagaagtcacggagccttccccagtatctcctgagatactactcagactcaagtaagcaccaggactctggggtccccagtcacttctgtgaatccaaagatccctcgggcaatgtgcagggattctgcacatttctgagcagcctgagatcaagtccgactattactattttacatatcacagcaacagtggcactttcactgtgctccagacttacggggaagtgagattagaacctcccctgcattctctctgccttgtgcaggcaacaatacactgtctgggaccgagtgtggctcatcagtagcagctttgttgtttgtatttttcattcttcagtacagggtgggacctttctactggcctccattaatagtgagagtcaaacaagacagtctgtgggtgactccaaagtctaactcagggtttccttatgttagttagcttggactactcttggctcctccccagagatctcaacttctctggaattctccaggtgccacaagcactgatttcagtcttggccttgcacctcccctgagcagcttctgactctcctctcattacatctccatttatggcctgtcacccactcaatgtgttaaaaggtaaagcattttgcaaagtacttatcctgaactttagccccaaatccacccagcttccctagcccaggccagctctgcttcttatgaggctgatgagaggtacaagggctgcgacccttgctgagtccattcctgaaaatgcccccaataaagcctgattagcgccaatgccacaggacattgttctgtttcctttgcaggtggtgcccagtgaggaaagttcttcctcctgaatatgaatattttggagcatgaaacagctgagctgatctggggaggggaggcaaccccttgtgatggtggtcagattgcttggttgggattgtcacagaccatgtgataatgggattatattgcatatcacagatgcgctggaccctcaagtgtgctggggaactctggttaaagaatagaagtgatccctttgttcatattcactatgctggatgcccttttgagatccctgcaggacgctaaccctctgactgcggcagccttgccctttgatctgaagcttttatcatacattgtcctgctcaggggatttgggtggggcgttactcctatatatcatcacaagaaagggattctctggagactaaatgcaaactggaatatcccctggaggctgtccccctgattgggaaatatgaagagactaggggtgctcagtgtttaaaataaaacttcagagagtagagtctgagtgtaaacccttcaattccatttaatctctacaaatgtatataatgtcaaaacatagttatgtcatatatttacacatgtgcacacaaatctattaatacatgttcataagttcacatatatgctttatgttatacatatatgcatttatacatcaactgatgttattataatcatagttttacagactcaattttcctttgggtttttccacatttccccactttctttaacacttatttcttgaaaattttggtggctgcttactgagattttactaaaaaagagcttcagaatttcatttagagtagatcttgtggcaaattctattttttttgtctgaaaaaatggtattttttctcttttttatttttaaaacttatcttgaagcataatatgtaaagtgaaatttgcagatcttaattgtaaatttcagtgtgctttttatgaacacatatactcatgtgccccatgcgtactcacaacatttccattactgcagaattaaaacattttgttctagtcaatgaaattattccattacagaatagatatgtgtaccacatagaatgtgtacctgagacacacttcccctggggactccttataaagtgcggtgaattgtgtgtcttttttcccattgaggaggccaatgtggaaaactaaagactgagatgatgtagaaaactgccctgagagggaacctcactctgccctgaggtagggagccagcactggtcaaggccccggtggaggatggcacctctgttgggtccacctggcctctggtcacaggcacgatggacctgggcctgggcagcagggggcgctgtggggctggcacttagagtctgtggggctcttagctgggaaatgatacctggccctggcctctgcctagggctcactggggccagcagctgggtcctctctgggccctttgggagcctcagtccaggtacatcccaggcctactcttcccagaaatgacccagccactgggactgcacacgggcccagggaggggcacgcttgggcaggggaagaggagcacatttgcatgaaaggcccatctctctcctctaaggctagagggtgaacacgagagacctgccgcgtggcttcctctgcagagatccggggagtctgcaccatggccttgaccccactcctcctcctcattgtcctccttcactgcacagtccaggacggcacaaagcatcctgatcccccagctcactgacaccacctcccaactcatgccagaactgtccttccctgttctgctttattcagtgtataatggctgtctgtgttttcgggatccctctggcagcccgtgccgactcagtcgacctctgcatctgcctccctgggagccctggccaagctcgcccacactcagcagtcagcatagcagctatgccattgaatgctttcggcagcagccagggaaggcccatcagtacctgatggagcttaagagtgatggaagccacaccaagggggctgggattcccagtcactagttctcagtctccaggactggagctgaccactatagtgtcatttctacaatcccgtctgaggatggagctgactatatctgtggtacagattgtagcattggtgtgccgtttgggtaaagcacagataaatggggaaatgaggcaaaaactgtttttctactctgctaccaaggttgaaaaatggctctcagaaccagtgtctgctgacctgcatactcaaatatgttatgtgtgtgtgtgtgtgtgaatgcgtgtgtgtgtgtactttaattttacgagtagagagccagatattttctgattcctgcttccagttcccttggaaacagctttttaggccaggccttctagggagtgcactctgatctgtaactattgtgcaaatattacaacagagcctgtctcctcctgctggtctggtgtattgtggctatataggggggtgcaaagaaattctccttttcatattcagacactgggactcagctgcatacctcagtcctgtcttattgagatcatttaaatgatcaatcttagaagaaaacttctgacttaaataaattttagaagtctatcaacatgctagaaagcatattccagataaataaaaatagaataaagatttatagagattgagatgaaaagctttaaaccctttgggggtttctgaaggtattctcaggtgttcagtgcctgggatttgggagtaagggataaggaggagaacttatttccaacacactgaagatgacaacagataagcagaaagttaccaaagaaggaggaatagaaatagccatgaatatcatcctggtaaccctgatctggaatgaaggatttcatttatttacttatttatgtatttattttcaaaataagtacatctcatggagtccttggcaaaagctgaaggaagtattgcttcaggaaatatctgtccagtaattaggaaactactaatgtgattgagcagagacttcattaacttcacatgcaaagaatacagacttgcagaaccctcctggaaaaccatgaaacaatacatcatcaacaataacaactatagcaaaaacagcaacaacatcaaccaaaacgctttacaaaaaagttctaatttccagaactgtcacattatattatttaaaatttccatttgtcaaagcaaaataatgaggtaggttcaagacacaggaacatattgccatatataacggaaaataacaaagaaaaaaacattaaaaaaacaaaaaaattaaaagttgacaaaaactattttcaaagaggcagaaacactggtcttattcgaccaatacttcaactccattatttctccatttgctcaaagaaattttaaaaatgtaaaaatgttcaaaaaagcatgaaaagaatgtatctccaaataaagaatattaataaaagatataaaagaaagagtcattgaaataaacatagattaattgatattatcctattacaggaatagaatgaaataagggtggaaaaatacgcaggacctaaagaccctcttgacaccatcaagtgtaccaatatacacataatgaaaggcccagaagggtaagagtgaggaaaagaaacagaataatgtaattgaaaaatggtaaccaaaactttcccaaatttgacaaaaagaaacatactcaatccctaaaaagttcaataaaccttaatcagcattaatcggaactcatagatataaaacttatggaaagcgtcatggtgggataaagcttactaagttctaaaaagtcaaatagacaaagacggttacaccaaaagtgtgtcaatttctgtttcctgccatgatgcaatagatggagttcttacaccataaacaacactttaagacataatcgagtgcatgtaatgactatttccagacagtgaatattggccaacagggataacttgattatgtaacctcagagaaaggaccctaacacgcaaatgagcactgcagtggacacggatttctttttcttcactttttttttttcgagttagggtcctgctctgtcgcccaggctggagtacagtgatgtgatctccgctcactgcaaactctgcctcccaggttcaagcaattctcctgactcagcctcccgaatagctgagattataggcactcaccaccatgcccagctaatttttttgtccttttagtagagagggggtttcgccatgttggtcaggctggtcttaaactcctgactgatctgcccacctcggcctcccaaagtgctgggattacaggtgtgagccactgcacccagccaacacagattttttttttttaattatactttaagttttagggtacatgtgcacaacgtgcaggtctattacatatgtatacatgtgccatgttggtgtgctgcacccattaactcgtcatttaagtatatcttttttttttttttttagacggagtctcgctctgttgcccaggctggagtgcactggctctatctcggctcactgcaagctccgcctcccgggttcacgtcattctcccgcctcagcctcccgagtagctgggactacaggagcccgccaccacacctggctgattttttgtatttttttagtagagacggggtttcactgtgttaaccaggatggtctcaatttcctgacctcgtgatccgcccgcctcggcctcccaaagtgctgggattacaggcgtgagccaccgcgcctggaccacagatttttttttggagacaatttttggcccagaaggaggtggtgaccaagataatcgtgagctttttacacagctcagaacacacagatgagaagtcagaaaaacatagatggctgagactttcagagcaagacactgaaaagcaggcagctacacagagcaaggtccctgcgctctgcatgaggcccctttggatttggttgggcaaaacatgacaccttgcagggggctctaatttaatgaataggccttcccctactgggaactaagattcatattttttctctctgtcctgttttttcaccactgtatctacaaaccctaggactcagcctagcgcaaagagccaattaataccatgtttgttgaacgaatatgtgaattcacctaaatagaattctcagtaagagaaaaagatctgaggaaaataaagtgatttttactgctttatgtgtattttgagtttgggttgtgaattgattcaaggggatatattaaattagaatgttgacctccgtgtttagagaacaagagaggaatatgaacttgagtgctggaaaggtgaccagcaggatggactgggtcccatgggtttgtgcagagaccatggaaaaggatgagcctccagttactaagtaattgaacaagatatattttaggtaaacacttattttataatcacctgttggaatgggtgataactgtagatgtgactgttattcattgactctctgaaaaaattatttattcaaggcaagaaagattggagaatagttttatcttgaaacacttttcataaacatgacatattcttgctaaagcagataccatattcatctccaagctggaagggttatctcatcttcccaaacatgcaccccttatagtatattttatctgcttttatggcatgtccactttcttggtcacagacattgtaagcctcagagtttaatttgtttctctactgtatacgtatggcacctccagttggtcactgaagctggagattgaaatcctctacatcccccagatctgtcctctggctctatggcgctgtcctgttccatcagacctacattgcccttccttgtgtgaaccctaacctaagtccaatctctactccatgaaagctgtctgtaacagaagcctggcacctctttctcctttttatgaaataaatatctatttctatagatagatctagatctagacattaatagctccaaatctgtagaggacaaagtgcctagttctcaggtgataaccaacccacatcttctgtcctggaatatccagccccagatatcaccccattttctcctccctgtctcgctaaatatatattcacccaccaagccactgggtttgtagtaatttgtcacaacaagaacagaaaaatatgtggaaaagaatggaagaggagtgttgctgttaaaaaaaatacttaaaatatggaaatagttttggaagcagacaagagatagagtttggcagaattttggaaagcatgttagaaaaatcctagattgctttgagcatggtgttaatgcagatatggttgctaaagacttggctgggatgggctcagtaggaagtcagaagcatggtagcgaaaaagctacattttctttcttttttttctttctttttttttttttgagacagggtcttgctgtgttgcccaggctgcattgcagtggtacaatcttggctcactgcagcctccacctcctgggttcaagcgatttttgtgcctcagcctcccaagtagctgggactacaggtgtgcgccaccatgcccggctaaggttcgtaattttagtagagatggggtttcaccatgttgtccaggctagtctccaactcctgacttcaaatgatctgcctgcctcagcctcccaaagtgctgggattacaggcatcagccactgtgcctggtctagttacatttttcttagcaaatacctaattatacatctacagactggaagtagaaatacagccagtaccagcactttgggagaccaaggagggcagatcataaggtcaggagatcgagaccatcctggccaacatggtgaaaacttgtctctaccaaaatacaaaaaaatttagccaggtgtggtggtgcatgcctgcagtccaagctactcaggaggctgaggcaggggaatcacttgaacctgggaggtggaggttgcagtaagcccagacagatcacaccactgccctccagcctggtgacagagtgagactccatctcaaaaaaaaaaaaaaaaaaaaaaagaaagaaagaaaagaagataaaagaaatacatccagtaaaggagctcctggtgcactgatgggagttcacagggaattaagagcgctcttttgacttttgtgggaaaaccggaggaaaggggatcattgttttttggtggaaaacaggttggctggattgtttcatgcaattgtatggaaagcagaacaggtgagcagcaaacttggatatttagctgagaatatttccaagcaaagtattaaaagtataacctcattcattcttgctgcttacagtaaaattttgtgataaaaaatgtgaagtaagggaggaagtcttaaatggaaagaaactagggcatgataattgaggagattactagcatatttcgccaattacttgctcattccctcttttctgggagaccctaaaagtaactcatcatttactgttttccatccgcttccttccttgtctagaatatgggcctggaccctccacaagatgcgtagagaagtcagaaggccttgtcctgtgcaagcattcaagcatccactcctcgcactaatatttctagacagcaaactggtgatccttgctcacctgaaacatacatacgggttggaggaagacagaacctaacacaccttacctgtgtgatgttcagggctggcctctaacttctgagagcttcatttcactccacttcctacaaggattgctcatgccctccttcacttgtggtgaagttcaaacaatacattagatttgacatctttgccaagagctgtagagtgcaaggtgctcacccagagctacatcttccagcagatgaggctcacagttaaatcactgctatggtgtccgtcaactcaggcactgttgtgccttttcacagagcatcgcctgttaactgcttcacccacccactgtgggagtccaggtaggaggacaatgcctccccactagctggctcctctctggttgtacctgtgggtcacacatgcaggtgacggtttgtactacctcctacctggctgtactccccaaagccagggctgacacccctcactgcacttccattccatcccatcagtcacaggaggcagctattggctcattaccctttgcaaggagttcaagggtagaagtggcccatttataagaatatttatatggactatcttgtatatcctgtgaatcatgatactgttaaatcaactctaatacatcatgtttatgtccactgaaatgatgatgataaaaggaaaagtgatatctggacacgcagactgaaaaagatcccaaagattctgcacacaaggcccctattctctggggacatgtgggaattcaatggtcttgctgacatatagagtttgcttcactctgtgtcaatctgaggcatttgtgacctcagagttgtgttttctaagaatttaccatgtgtggcagctggacttcaagttatacctaaatatctctgtctcctagcactcacatccctgtacatattgaaaagggatcactagtacaattgataggatattgagaaaatgactgatgccaggccataatacactttgagttttgcgttctgctctctcagatcacttgctttggggaaagccagttgccatttgtgaggacactcaagtagtcccacagggagtttcatgcagcaagaagctgaggcctcctgccaccagctttgtggctcagtgaaactgtaagttgattctattgccttggtaaagtcttctcatggctttagttccccccactgaaatcctattttcaacctcatgagcctatctgagccagagccaccttgctaaactgctcccaggtttctgacccacagaaactgtgggattgcacatctttgcagttgctaagttttgtagtatttgatgtgaagtaattgaaactggatgcatcgagagaggggaatggaggtggcagagtgggtggaattaggcctggaggtctgctttcagtgagatgtgatgggaccatggcagacacctccctgtttctgattccagtggattgcttactgggcctggcctttttcttatactccatgacttcattgttaataccctacaggaattctgtatgcgctatgtcttatccatcttccttgggtaaatatttaaatataaatgaatcaaaacacatgggccactttctaatcttgattgttcaaaactgaattcctcaaattgaggggtatgattttctttattgtccttggtgctcgtctgccagtgtctatcaatggtagaatcatgtaaacagtcccctcccctattttgtttcactctctgaggacgagagagaagtcttggccttcaacagaaaatggtcaaactagaaagagtaacacttttgagctcctcagtgaatgtggccttggaaaaccccttcacctgggcagcaaaggaagagggagaaagacagagcctgaactggtaggaagtcctacctcaaaaacatcagtcagtcctcacatggatggccagggcattaaggagaactaattaagttaatttcacattctccatgacaaatgctgttgtcatcagtagggacctctcctctctttttccatcctcctacctgttctcactgtccctgacttacccacagtgaactttatgttttcaccttttatatccctatgcctggtcctctgctggcctgtgctgatcttttcataaatatttttgaaatgagaagacgcattttcttaagtaccatgaaagtcgacatcacatccatctttcagggtcctgctcccagactcttctgacttatctgttcactgtgctgggttggcagggaaaagtcatctgcagcagaaaaagtgacaaaatggagatacatagtgtgtcttggccaaaaatcagccaacagatgagagagatctaggattgtgagaagttctgccgttccccagcacctcacactatttgatgtctcaatgtttgtacatatcactatattttctagaagatgcactacatctagaaatagtgtttgctttgtttgtccccaagcaggaccccactctccactcagagccagttcacagttgccttcttccctggcccctgtggaaggagctgctcaggtgtttgctcccagagccctccgcattttccccttactgcggcctcctcacaatgaacaattgtcatgtttttcatttctcctgttcctgttattctagaaatccctcaatcaaaaaggatggttatgaatataagttacctgagacagagcaggggtgtggtccatggatgctgtgacctgacagggacccagcactcaggccaactccactcacatgattctgactgaaagactgaagtgtgcagcagggggaaatctgggtctttccaagctctgaacagtggtgcccacatatctgttatccctgggcaatggagcctgcactcactgaggaagataccacagctgtgtcttctctgggctgggtagagtctcctactcacaggtctgtggaaggtgcaggagctgcttcctcacttactcctcccgtgggacaaacgctgagtctcacccaccaacccaccatatctaaagaatcatgctcagacttcagctcttcctagggtggaacaaagattaccaggaggatacacaaatttgtgtggacagatcctcccttttcaggccactggagaagataaaagaggcctgagttaagcagcttcctctgtggggccacaggaggcggtgtccaccatggcctggacccctctgctcctcatgttcctctctcattgctcaggtgagaactggttttaggtgtctagggttagctccttagcttgcgtcagcctctctggctcagatccccaagacatgtatctctagttcctgccccagcccccatgagtgtctgtgcttgcaggttccctctcccagcctgtgctgactcagatgacctcactctctgcatctccgggagcatgagccagacttacctgcaccctgagcagtggcttcagagttggtaactttgcaatatagtggtcagctgaagccaggcagccgtcccaggtgtctcctgagatactactcagactcaaatatcactcagcaccctggggttcccatccacttctctggatccaatgatacattagccaatgcagggattctgtacattcctgggctgaagcctgagggtgaggctattactgttgtacgtgtcacagcagctccaagtcagcactccagacccactgggaggttacaaaaacctcttctctgatctcctggcctggtgtagtcactcctgctggtggctctaataaagtctatctcactgggtgacttatattttagatcttcaaccagcacctgattctttttttcagacaagtagatctgaaaatgtgactttattttcttcaattccactttcatattgattcatgctcataccttctcatttctttctggttttcacaggcagaaatcccttgctcagagacaaaaattctctaaattgagactttggaggagaccaaaagagagtggttcgggccatgcccggctcagagtctaggagtgactcagagatgcttctggtcccagagcttcaatctaggcattggatacaataccagcattcacaatggaattgtattctctatattagcaacaaaccatcacagattttgaaataaaaagaatataatttataataacatcaatataaaatatttaagggtaaatattaaaaaatggaaagtcttaaactgaaaactataaaacgttgagagtcattacaaaaaaaccttaaaataactgatattccttgtttgtagttggaaaactcaatgtgattataatttttataatgacaattctttccaaagttatctaaggaatcattgtaaggtcttcagtaaaaataggtttgcagggaatgaggagataaaaaaatctcaacaaagaaatgaaaactgtaacagaaaacatcaatgaaacaacagacctgggataatccttctcagctgccatgggatctaactgtatttaagaaaggggtgagtaggaaggcggctgccaaatccaggaacacagatgtcattttgagtgaccaaggtgagccaagggaggacagctttagtcagaagagcatagaccaggagcagaactcacatatctgaagctgatgggcagagtgtgggtgcaataggcctggcattgggtgctgctgagctgaaattatgctgtcacctgaggtgcgcccctggggtgacatggttctggttgttcttcaccccagggaaggacactgtgacctgttatctgttggaggatgaggactcagaaagctctttataagagagggcaccagtgtgatatgagggtccctgattgtctttccaaaggttggaaattgaacccgcatctttcatttttgtgtagagaacccaagatccttttctacataatcaagggttatttccaatagctgccttggcctgtctcagaaagagtgtgggtttgtcttacagcaatggtgcccactatttatgggaacgtcttgtataccctgatctatgctttcaggtctttgacatctcaggtttttggcctacctaatactagccatacgtctgggtactgtgatctacctcctactacacatataaatgcccatctcagcctcatctctccttgggatataaatgtgtgcaagggatttgaagcagctctgccttctttttgggtcctaaggatcagggttatgggtgtctccatccttccctgggtcttctcctcctcactgtcctgaaacatgacccagacacaggctcctgaggctcctgcaggccttcttccctgcttttgccaactgcaggtggaccctgccctgtgctcacaggtctttgtatctctccctgctggtcaattgccctgcaggggcttttcttatttctccattatgagaattcctttgtttttggaggaaataatttttatctaatttttgatttacttatcataatcctagaatttgtataaaaactcctgtttttgcataatgaaacagttgctatctcatgccattttattcaaagtcatgtgcttctgttcacttactggttagaactattgtttaatcattgacaaatatttatcgaacacccactctgcgccatgttctcctatgtcaggtgctgggtatacattgatgaatgaaacagactctatccttatggaacttgtgtctagtgagcttagaagtaaattttgtgagtgctaggatggagagtcaagctaaggactcttagttctgccagcatttaacatgttgttcttatacattttaagaataaattactccagaagaatctttttgttttgttttgttttgttttgttttggtgaagagtatccacatagacacacatagcaaagaccttatagaatgcatcagagataaacaaaataaaatgtaatgtttcccagagctggatgtagtttctggtttgatttattttaatgacacacagaagaaatcactttataatgaagtaaaattccacactacagaaacagagtaaaaatactttcttgaaaaaaatgccaaacctacctttaatcccaaggaaagagaattgcttgaatagatctgttagtatgaaacacataatagacaacctgctgtgtaaaattacttggaagtcatattttagaaggttttaaacattcttaatatactctgtttttgatattacgtcttatatttttctctgtggtggaaatttatttctaagaaataagaaaggatattagaatggcaaaaaatatttgtataaatgtgttaacattttaatggtaactatatatgaataaaataaaaacattgttaaaaatttattggaatgaataataaaattatcaagtttataattaataaaatcaagtatatttcttcttatgcaatttaaaaatagtgcagaatgtttattattctggtatcactaaaaatgacaaacttcattcatatctatagaaaaataattataaaattcagcaagtaatacaggagataatttgaacaaatattgaaacattttcttacttaaagacactaggtaaaaatttcagcaatgagtagagaggttatcaaggcgcattttattattgatgattgatatatgttttttctctcgagaaagtgcacaggtgggtatcagcagaggagacagtataggctccccagatgtcaaagcagggatgcgccaatacccatcagtcatcatcataaaagacagactgtgccttcctgtgtcaggctctgtgccaggagctgtgtgccccacgttcccttccagggtcctgcctgaagtctgtgctcactcagccagccccatcatctggaagtaacagtcccctcctcctgcactggaataagcagaagatttgggtggacagtgtggcctggccccatcagctcccaggagaagctctctgtctctctctcatcctgcatgccagttaatgacgataaaacccacctaaccaacccatctacaacactcagcttcatccctatctctctctcacactccatcaagggacacagtcatcccatgggttttttcccctggcatctctcactttcttcctcttccagatccctgggatcagctatcaccccacccgacaccccttctcctgcttggctgccttcaggctctttgttgagcctgacaccaaaggatgtctttctaaagtgtcagtttcatctattctgcccccagttcacaacctgaaacaacctccgatagtgaatcaagccaagcccctcactctaaagcacagagacatgccatgaattcctaaggggatgacagaatacatcattgatgagaagattgaacaagtgaagtgtgagtggcaagtcaggtgaggacatttgaatccaatctggcatttaaaatgtctcttcatttccaaagtcctatctctccctagtaatgttgtttgactgctagtcccagagcaggaccccacatcccagtgacagccaagtcacagtcgcctccttccctggcccctgtggaaagagctgctcagggctttgctcccagagccctctgcattcccaacttcctgcagcctcctttcattggatgggggtgatagtttgcacatgcctttctagtaatccaagaaaaacttactgaaaaagtctgtttgttcatgtcagtaatcaggggcatgaccagggcatggcccataaatgcctctggactgatactcaccaggctcccaggccaacaccacatacatgatttccactgagagaatgcagtctggacagagagcagcagggtacactgtaggtctgcccagtgggcatccacagctgtgccaacccctcccaccccacaaattcctcagggctgggcagtggaccctgccctcactgagcctgactcagcagctctgtcctccctgggtgtggtcccagcacccacttcctcccaggtctggcctgccagactcccccctccaccagaccctaggacttgaataaatacatagggtaaggtagaggcaggcaatgtgggggacacatttgggtccataactcctcctctgtgaggtcagtggaggggataagaggcctgaggcagcccactatggctgtggacctcaggaggactgtgttgaccatggcctgggcccctctcctgctgtttctctctcaattctcaggtaggcacaggcctcccatgtccagggcatgtccctcaggcttcaccagtcccctctggctaaaatcttacagcaactttatgctggtaggtggcccaactcccatgtgcatctgtgtctgcaggttccctctcccagcctgtgctgactcagccgccctccctctctgcacctccggatcagccagactctcctgcaccctgagcagtggcttcagtgctgatttctgctggatatactggtaccagcataaaccagggagcctccccagtatctcctgagccactaccaaaattcacttcatgaccagggctccggggtccccaggcacttctctggattaatggaaggccggtccaataaagggctcttgctcatatctgatctccagtctgaggatgaggcttactattactgtatgatcgagcacagcagagcttctcatgctgacacacacaggtggggaagtgggacaaaatctcagcctgctcagagtcttgttctctgatgaaatttagatcttaaaataacttatatcacttgtgtgggatgagtgagatatcccgagctcacaggaactgtcgatgaaaagagtcgagctctgtaaaatattgaagacatttattccaagccaaatatcagtgaccaatggcccacaacgcagccctcaggagatcctgagaacatgtaccccaggtggtcaggctgcaacttggttttatacattttaaggagacatgagacatcaatcaacacatgcgagatgtacgttggttgagtccaggaaggcagcacaactcaaagtagtggggctccaaagatcgtctttttgataattggttaaaagagttaaattattgtctaaagacttagaaccaaaggaatgcctgggttaaattaaggcattgtagtgaccaaggttttgttgctcagaggaagcctccaggtagcaggctgcagagaaaatagattgtaaatctttcttatcagatgtaaaaagtctgttctctcagaaattccaaaaatgaggaggcatatctggctccccgttcccatgatgacctgaactctctttcagattaactttggaatgcccttggccaaaaggaggggtctgttcagatggatgggagtcttagaattttatttttggtttacaatcctgtaacacgtcctgtaatttgctgcccagaggtcattaatggcctggaagaaataatgtgccagctgcagtgttgtccacagaaagacttactcattctgctgccctgagtagtgatatcagaaagatccatctgccaacagtcagaatacccttccaggagggttgcacagtaccaggggtgctggaagacctgggatctgaggcaagcagggggcactgttggatggatcccaagatgacaggattaccaggccacacaaggattaaacaagagacagtaacagtccactggctcttacacacttggataagcagtgacctccctgaagaatgactttcctgcacctgggctgaaggacccacatgagcactgggttttggataaaatagagcaatttcatttatgaacatagatgtgaaaattcctcagcatattcacaagtagaacccatgctggacctctgacctctaggatttaggctgagaacaggacatttgtgaggtcggtggggaataagcatgaactttggagggacagcaggtatgaggggtgctgagccgtatgttagatgccccaatcagggaaagagcctcgaggcttccagtgcagcttccctgataccctgtgggagagaaagatagatactggatatgctgcaatagagctcactaatgctctagtaaagagcaggcagcttgcattagcacagtccttcaggagagaaaacgcagccccaggaaagctgtcagaggccaagatgactcattagtcacattgaattcataatgcatttatgatgaaatatatgataaatgtcttatccttttgttcttttttattttttattatcgtgggtacataataggtgtatatatttatggggttatgagatgttttgatacaggcatgcaatgtgaaataattatatcatgaagaatggggtatccatcctctcaagcatttatcatttgtgttacaaatgatccaattacactctttacataattcaaaaaagtacaattaaattattatgaccataggtatcctgttgtgctatgaaatagtaggtactattcattctttctaactactttttgtacccattaaccatccccacatcacctcctactccctgctaccttcccagcctctggtaaccattattctactttctatgtacatgagtttcaaatgttttgatttttagattccataaaaaagtgagaatatgtgatgtttgcctttctgggcctggcttattacacttaatataatgatctccagttccatccctgttgttgcaaatgacagactcttattctattttatggctgaatagtactccatcgtgtgtatttaccacattttttatgcattcatctgttgatggacacttagattgcttccaaatcttagctaaacagtgctgcagcaaacataggagtgcagctatttctctgatatactgattttctttattttggatatgtatccagcagtgaaattgctggatcatatggtagccctatttttaggttttttgaggaacctccaatcgttctccatagtggctgtactaaatccaagaacattcaaaatcatatttatatcagtgctaaaaagtgtgacttgacttcaaacaatagccagtagttggtaggaatacaagtataagtttgctaaaaatatgatttgtcatttatatgaatatttctgttcccagaacaatctcatgtagactggcttctggaatctctcctacctcctactgagctgactctcctggagcctggccgtaacggtgcagggctggaagctatatactacaagcacatgctgtatggcatccagcactaacctgggcagatgacggcgaaacaatgtgtgatatttccatttgatttattttccttctttctctatagaaagtgttattataaaactgttatgttgaaggaacacaaaatttgaaggaaaggaatcaaacataaatgttaaatgtttatgtgtgtttatactgttgatctatgatatctcttgtagttactgttcaacatttctattttatatgcttttgtaaaataaacaacatattttatacaaaaactctcatgtgtgctagttgaaagtaatgccacctaaatgcaataacagaatttgaggagactaaaatgtgttgatttgagagacagtaagagtaatttagaacaagtccccatctggctctgaaatctaatcctttgctggtatccctacacctgaaaacctgcaggctttgcacctctgcagacagatgacattgggttaaattcatgggtctccactgagggtcacaataggctggtgtggcacagtgcattctgggagatacagaactgagggacagtaggctgggcgcggtggctcacacctgtaatcccagcactttggcaggccgaggcgggcagaacacgaggtcaggagatcgagaccatcctggctaacacggtgagaccctgtctctactaaaaatacaaaaaattagcctgacgtggttggggggcacctgtagtcccagctacttgggaggctgaggcaggagaatagcatgaacctgggaggaagaggttgcagtgagccgagattgtgccactgcacttcagcctgggcgacagagcaagactctgtctcaaaaaaacaaaaacagacaaacaaacaaagaactgagggacagtatatccccagtggacaccgatccataatcagccccagtcactgcacagactgggtgtatggtgtcctcagtgcctgctgcttccgtgtaaatgaacagcaggagatcctagggtattagtgaattatatattcatttccaacgtcacactcaagatgaagtctctacagtatttgaaattgaacttggacagcttcaactatttttgtttcaaaaaatattatatatacaaaaataccctatttctgaaggtaattggagtttattttacttccacaataatactaaacataaatggttagcgtattataaagtggtgtgtctaggcatggacagcagaaggcacttggagcctgttcctgaggggtctgggggtgttcggagctgagaccagccacttcccctgtctggtgctctctgttcagggctcacagctgtgatctcctcacccctgaacggctcacagcactactcatacttatccctatggcgccctcaggcagaagagtctgatccagggctcagggtgggatcagaaaagttcccatttgcatgaggagatcctccctgcctcagagtataaagagagaaaaggagagagttgggaaaagctttacttcaactgtggggcaaaaaggcaggactcaggacaatctcaagaatggcctggtcccatttcctgctcaccccctttattcactgcacaggtgactggacatggggccacggaaggggccctggggagcccatggagagctgctttctcctcttatttatagacccagaatcaccatgtctgtgtctttcccactttcagggccttgggtcccatctgcgctgattcagtcaccctcagtccctggggctctgggccagagggtcaccatctcctgcactggaagcagctccactttggttattggtgtgatatacactggttccagcagctccaaggaatgacccccaaactcctcatctataaaaacaattggtgacacctgtgggtccctgacaattctctggcttcaagtctggcaactccattttcgtgaccatcactgtgctacagcctgaagatgaggctgattatcactgccaattctacaaaaacagcctgagtgctttcacagtgctccgggttgaagtaagtcagaccaaaacacacagtgtgcccagccatgaagctctcccatgcaccccctactctgcagctaagtcaatgtgttctctcacttgtttgtcctaaaactggggcctgagaacttcttcagggtaatttttctagggaatgtgtcctcaccctctcaatatctgccccaaattcactctttggcaacaataccatgtgctcttttctcagaggtagcagctggtactgaatgccagaggccagctgccctgtggtggagtacagatgggtgaatcagtcggctggggcttccacaacaacacaccacagactggagtcttcaccaacagatatgtattgtcttactgttctggagtctgaaaggaccagatgaaggtgccaccccgtttggttttctctttgccctctttcctttgcttccagatggctcttttctcactgtgtcctcacatggccacccccaggtctgcatgtggtttttgtacacatttcttatgaagtctttagtccttttggattagagactcattcctatgacttcattgaatcttaataatcttagtgtccagatctcccaatacagacaaattggtaacttagttataacataaaaaatcagggggccaggctcggtggctcacttctgttaatcccagcactttgggaggctgaggtgggtggatcacgaggtcaggagattgagaccatcctggctaacacggtgaaactccatctttactaaaaatacaaaaaattagctgagcatggtggtacatgcctgtagtcccagctactcaggaggctgaggcaggagaatcactggaaccaggaggtagaggctgcagtgagccaagatcacccactgcactccagcctgtgtgacagagcaagactccatctcaaaaaaaaaaaaaaaaattcggggtggatgcaatataatttgtaacaaaggatcaggggtccagggacccagagtccatctgtgtctgacccaggagaggtgatgctgcagaggccacctggtcactccattcctctgagctcctactatgtgcagattctggatgtgttcttggtgctcagggtacagcgtggataagacaggatggtccctgtcctccaggaactgatgctatttaggggaaaacagaacacatcagtaaatgtatcaataagaatatgacatgttttaggaaaatgaagagaggtgtgttttggtgaggtggggtgagcagacttagaggagttgatgacaaagatgcagcgactgattaaggttgtaaaattcacctgctgcaacataaagtgaactaagaggaagtgagggtccaggcagggccatatgaggctctggttttgacacaaacattaggctgtggagtcctggacatgggcggaacacgcaaacggtgaaaggtcatgtctgcatggttcagaagtgggaggtgctgaggaatggagtgtggggagacagggaccacagctgggatctcaggacctgtgaggggtataggtgagctgcagctaagtgagaaaacattaaggaccctgtgtagttgacacaagattattgacatcttaagtcttcaataaatacaatcagcgctgacaaatgtggccgtgcctcagaagagctagaaatgtttatgtctaggtaactctcatgttctgtagaacttcacttgtatttttttggttttaaaggattattataagagcagacgtttatgaatatactccattcttttatcctcaatattgcccatctcttaaaatcctttggctttacacacacctacaacaaactgatcttcaaaaattgataaaaataaacgatgtgtaaaggataccctattcaataaatgatgctgagaaaactggcctacaatgcagaaaagtaaaactggacccctacctcttaccatataaaaaattaattccagatgaatgaagacttaaatgtaagacctccaactattaaaatcttagaagaaaagttggaaaatactcttgtggacattggtgtgggcaaataatgtatgtctaatcatcaaaagaaattgcaacaaaaaacttgacaatcaggaccaaataaaactaaggagctcctgcatggcaaaagaaactctcatcagagtaaacagacagcctacgcaatgggaaaaatatttgcaaactatgcatctaacaaaggactaatatccagaatctataagaaagctaagtcaacaaaaaaatttaactccattaaaaagtggacaaaggacatggtcacttctcaaaagaagacaaaaaagcagccagcaaacatgaaaacatgcagaacttcacttatcagagaggtgcaaatcaaaaccacatgggatatcatctcataccagtgagaatgggtattattaaaaagtctaaaaataacagatgctggcaagaatacagaaaaaaaggaatgcttatacattgttggtggggatgtaaattagtacagcttctgtggaaagcagtttggagatttctcaaaaaaaaaaaaaaaaaaaaaaaactaccactggacccaggaatctaggtgtgtacacagaagaatataaataattctaccaaaaagatatctgaactcattcgtttgttgcagcagtattcacaatagcaataacatggaatcaactcaagtgctcattagtagtggatcgagtaaaaataaaatgtgtgatacgcattcaccatggaatactatgcagccattgtgaacaacaaaaccatgttctttgcaaaatatggatgtagctgaaagctactttgcttccagatggctctcttctcactgtgtcctcacgtggtcactctcaggtctgtgtgttgtttttgtacagattgcttatgaagtcattagtcctcttggattagagactcattcttatgacctcattgtatcttaattatcttagtgtccagatctcccaatacagataaattgttaattcagttataacgtgaaaattcagggtgaacacaatataatttgtaacaaaggatcagggatctctttggcttctcgatggatcacctgccaaggggcaagggtgtaatttttacaatgataggcgcatagctcttaacacaagacagaattaccctgttgaatgcttcattcaaatgatatgttagggaggaggccagttggatgataaagctttgggaatgaacatttaacagcacaggatctaaaatgcagaagaaaagaacctctgatgcaaactttctgagtggagataaactgtctgatatcctgcagattaataaaaccagaaacttcatctgccccctctaatagaaatctacacattaacacaatttcactatatgaagtttccagaagatgatgtggagcttgcaggtgagcttcattttacactttccgcctattcatttctgtgggaggacttactttccctctttcaattttctcatgtgctgttcatgtcacaccctctaattcaaggctccagcccacctttcctgccaacaccaacactctctgtagatgaaaacccaccagtcagcagcctccttggcctgagagaggtcatcttcctgggtttctaagactctggtcctgccgagattctccttcctcaatcctaatcccgtggtctctggcagccccttcacatggacctcatcgctcgtctctgtgttcctccagctatatccacgtcagaaactgctcttcatctgcactagaaataaagaattatcctctcaactcttaaatgtttgctctgattctctcctcttctttgagctcaggcacaccaccccctctcagattcctgagtgtggcagtgtcccctctccagtctccctaccacctccaatggtgaaggcgaagaaaggatgtccctgcatgtatcacatcctcatccttcccttcagggtcagctccctgggtagggaaaacactgttcccttgaggctcacatacccactgtcaaaaagcacccagcacatggtaggcactcaataaacctttaccaaatgcagacctgcctctcaccacactggacacattgtagtgagctcaggatggggctaaactgggagtattagctgtaaacttgctcctctctctgtccccagcctgagagctgagggggcacccacgagggagagcacctaggggcagggaggggtcacaggcagcctcatcctctgtgtgagacactgctcagactgggggatccctcttcattcagatgggaagaaaagggaaacaaaattcggtaggaacttctatgcatccacacagaggaggcaatgacaagaaaacacaggatgcaagcacagtggtaataatgtatttctacctaatattgaataaaactcaatattgcctgtattctgtaaacaataactatttacaaaactgactgtaaattatgattttaaaaaccacagcttatgaagaagagaaacctcaaacaatgacacccctgaattgcaaatctaagacatggcacacatttattttcagttccatatgtggcctggatttatttacaagacaatattatgatattatatgtcactattccattttagatggtgtatttaaaatctcacagtactgcaactacctagtaatctactcatcagtataaacatcaatgtgacaatcctgctatccttctctacccctgcataaccccagcaaaaattcattatgaattcacagaatgtaatatcagaactgttgtagccacatacacagtttgtttcattttatgttttgataaagtaatcttttttgtttaagcttattgttttttaaaaaatatattacatactagatgtcattacaaatcagagattaataatttctcttatgcttatactactcccacagcactcattactgaatgtaaaccatatttatattttctttctttttttttttttgagacagggactcactctatcacccaggctggagtgcagtcgcacaatctcggctcattgtaacctccacctcccaagtttaattgattctcctgcctcagcattctgagtagctggcattacaggcacccgccaccatgcccagctaatttttgtatttttagtagcgatggggtttcaccatgttggccaggctggtctcgaactcctgacctcaagtgatctgcctgcctcagcctcccaaagtgctgagattacaggcttgagccacctgcctggctccatatttatattttctaaacatcctacttggagtggctgatcctaccagctaccatgtttccacctcacctgggatcaaacactgacaattggtaattttatctcttgcagtcttcaaatattgagcaaatttgccatttttgctattcaataaaaatgctggaaagttatttgccatgccactgactctgttcagtgcttggaggacagactcctaggagtgagaagttgaccacagcatctgaatagctattaccccaagtctgtggaaattagagaacaaaattttaccagaaatgccccccagagcttctccccataacctcaccacccttagagaagagagctcctgttctcctcagcgctgcagggtccacagaggaggaagagctctggccagcagggaggagccacagaagaaaggacctggtgtctcccgtgaccagggtagtgagtcatgggaaccagtcactgctctggacttgacctgacctaagaggacttggtatagagtcaccacttcagtcctcaccaaggaacatccaaaaagccctggacagattcacccttaaggagaccagtaaagcatgaactgccctgagttaatgagaaggtcacaaaaagggtctgtctggcctggtgctgagcctgggggcagtgatcagagcagggggaatgcacagctggctctggggacatctggtcatcatgtcacaggagagtgtgtctggatgtggacacctggggacatgaagggctcattaccaagtgatctaggggagatcagagctgcgatcagctaactgcctgcatggtgccctctgctcagtgatcacagtggtgagctcctgatgccccggaacacacagtttcacccttgcctgtatccctgatatccacgagaggggcctgacccaaggccagcgtgtcatcagaaggctggggggctctaatttgcatggatggaccctcattctcagagaatgaagaggggaagggagagatttggggaagctctgtctcagctgtgggcacagaaggaaggcaggactcaggacaatctccagcatggtctggtttcctctcctcctcactctccttgcacactgcacaggtgactagatataaggccatggctaaagccctaggaagcccatgggccctgctttctccttttgtctctcaacccagaatcaccatgactgtttctctcccacttccaggatcctgggctcagtctgtgctgactcagccaccctcagtgtcttgggccacaaggcagaggctcactgtctcctgcactggaagcagctccaacactgggactggctataacgtaaactgttggcagtagctcccaagaactgaccccaaactcctcaggcatggtgataagaattgggcctcctgggtatctgaccaattctctggttccaagtctggcagcttggcctccctgggcaccactgggctctgggctgaggacaagactgattatcactgccagtcccgtgacatctgctgagtgcttgtacagtgctccaggcttgcaggggagtgagacaagaacccccttcctcctttcccaggagggtgagtgcccagcagctactgcacaggcctggcctgtggcttctgcagttgctgtttccccagtgggcctgggagcatccagggccccacctgggagtagatgcttctcctcccctccgtcctcagagtcacccacagcagtccctttctaggaaaagggcctccagaaaacagaatgtcctgtaccctgcaacttgggacacagggtctctgctctaaagtccaggggctggagtgacaaatccagcagtgaaatctcagatctacatctgatggggaacctgcatctccatcatccttttgctatttccaggagttttcaaagcagtgtcttcctctcactggtcctcagtgtgttttcctgttctttttgtttcagcctatttttttttttttttttgagatggagtctcgctctgtcgcccaggctggagcgcagtggcgcgatcttggctcactgcaaactccgcctcccgggttcacgccattctcctgcctcagcctcccgagtagctgggactacaggcgcccgccaccatgcccggctaattttttgtatttttagtagggatggggtttcaccattcacaggattgtctcgatctcctgaccttaagtgatccgcccacctcggcctcccaaagtgctgggattacaggcgtgagccaccatgccgggtctgtttcagcctattttttatgtgtctttttattgaggaataattaacaaaataaacccctgatatttaaagtgcccaattttgtgtgttttaagatatttatacacccttggataatcaccacaatgaatcagtgattccatcagaagaaatcggtgactggttctggcagaatccagggaaccctatctaatatctcgtgaacttctacttggactcaagtaagaaacagggctctgaggctcccagccacatcttgggatctaaagatgcgtcggcctgtgcaaggattttgcacgttgctgtgctgcagcctgagaatgggtctgtctcggggtctgcacaggggcagtggatttcacagtggctctgaggcttacacagggctccaggcccatgggaaagtgagacacaaatcttccctctgctctctaggcctggtgcagtgatcctggctggaggctctgataaatctagctcagaatgtaacttctgttgtgaacatctgattttccttggacaaatagttctgacaatatcttatttcagttcgactagtatatcgatccattgctcatacttctcattccattcttgctttcgcaatcggtggaccctgtcctgtgcccacagttctctgcatctctccctgctagtccagcctcctgcaaaggttcagctcccagaagagactcctacatccactgccctggaagaagcaacactatgagtagaatggcaagattttgtcacatcagcactggggataactcatcactactctgggcccattgaagcaatcacatactctctgaacctcagttttcatttttggcagcatgtaaccctacctcagcagctcttgctttcaacatggggatgagctgaagaagaggcttgtaaatgacaagtatcagtcactgttcaccgtgcaggggtgtctgtgtccttctgtgtcaggctttgtgccagcagggctgtgccccgcaaactcttccaaggtcctccatgcagtctgtgttccctcatctggccacattgtctggaagttaaggtcacctcctcatgcactggaacaagcagcagagtcgagtggacagcgtggcctggcaccgccagctcctacgggagccccagatggtaatgcctgctggtctccagcttgcagggttctgattttgggctcttgctctaggtctggccacttgggcttctgcaatactctgggatcctgtatgaggatgagggtgatgatcagtgttcaggatgtggaaagagccccaggttaacccaggacacctgtctcatggggacatgaggcacaagcctcccatctgatcccacagcctggcctatagactcactttaattttgtgtgactgtcacctgactcaggacattcctgcagtcattttttcctccaggactgatggaatgaggccattccctgggtctgtcgcctcatatgcagtcgacctatatactgggctttcaggataaaacattcccagcctgggcattgcaatacagacaggcaggtagctcagacagaaaatactcttgttgattccagatttctgggcacatggacttggtgtgtgtttgtgtccatgactaaggtcaggtttggggttgggagtgagagtggtcaccacatggtccaggaagaatgtgttgtcaaagataaaattcgtacaccttcctgcccttccctgtacctgaggcagcttcctgaagcctgcaggtttctgagattctccataaatggagaggaaacatcccatagaatggatgggttttttttgtcccagacaaaaagacaagacaggacgagggtacagatgtcagcaagggttaaacagcaagtatgcacttgatcatgccaaagaatactgaaatagctttgagggtaattcagtgtccttgagaattaaaaacaaattggagattgagggcttcaaacccccattaggtccttgtgcaaacagatgctgaattccaacccacattaagaaagaggctaaaaagatgagacaaaatctctgaaagacaggtggaggggatttctgcagtttcttggtgcttaagagacagggacctgccaggcactcacctgagaaatcctgcagggtcacagcacagggaagggaatgtgtcgggtacataagatgactttgatgttgaaaacaccacctctaccactgataatggttttcatcattcatacttaggtgcatgtacaacctctagcaaccataattaccacaaaggacaggcattgtgtaaacttttatgaggttctgtgttataaaataattacacaaaatgtataaataatgtgggcactaataaggtgaggttatatgttgcaatatctggggttcctattgaatttatagactgtaaaactaaataggtgctaatgtaaaatgatacagttagaaatacttgattcatgaaaaataaaaagtgagcgaaaagaaataaagcaaaaagcccaaataaaataaagagaaaggtaaactcacacacaatatcagcaattatattcaatgtaaatgtgttgatgaaccagataaaaataatttccttaaaataaagttacttgtgtgttatattttaaaggatgctaaaaatacactatgcaaacatttacctgcagaaagctcttgtggttatctcggtatcagaccagataatttcaatgaaaattatttacatcaggaaatgtgggacattttatgtatataaaatgaaatatttgacaagaacacataacaattataaaatacacatcagtccatgcatggtggctcacgcctgtaatcccagccctttgggaggccaaggtgggtggattgcttgagctcaggagttctagaccagcctgggcagcatggcaaaatttcatctctaaaaagtacagaaaaaaaaattagccaggcacggtggcatatgtgtctgtagtcccagatacttgggagcctgaggtaggaggatcccttgagcctgagaggtggaggttgcagtgagccaagatagcgccactgcactcctgccagggtgacagagtgagatcccatctcaaacaacaacaaacaaacaaacgaacaaaacaaaccaaaaaagcacacacaaataaacaaaccaaaaaacatgtccctaataatataatctatataaaatataaattagcaggactaaggaagagaaaagaatcaattcccaattatagttataaataatagcacacacttctattaactgagtgaatcagcagaaaaaaaattgcacataacaatatgtgaacaacctgaaaaaccaaattcacccactgacgccaggagcccaaacctgaggagtagttggctaatgaatatgtattactgaaacgattgaataagtgctagaagaaataaatgaggcattcattatttttacccgatttgatgcttctcctctctgtcctgtgagcagggggcactcccatgtctattcctagtcccattcttatcccctcgtctctctccccaagactgagctgcattctgcagggtggctcccgtccccctggagtaaatgactgacgtgaggagccctgccttccagtgctgctgttttcatcgtgctctggtttgaatgtctcccttccaaaaggatttatacttaattgccagtgtgatagtactaagaggtaggccttcaaaaggtgatatagtcttgaacacggagacctcacggttgggatcaggtctcttatataaaggctggaggtagcggtgtgctctgtctctcttcttgccatgtgaggacacagaaaaaaggcacttatcagatgacagtgccttgatcctgaacttcccagcctcaaaaactgtgagaaggccaggtgcggtggctcatgcctgtaatccaagcactttgggaggccaaagcaggtgaatcccttgagtccaggagttcgagaccagcctgagcaacatggtaaaaccccatttctataaaaaatacaaaaattagccagatgcagtgacaggcacttgtagtcctacctaatcaggaggctgaggtgggaggatcacctgagcctgggaggtcgaggctgcagtgagttgtgattgtgccactgtactccagcctggatgacagagcgggagactgtctcaaaaaattaaaaaataaataaataaaaaataaaacagtgggcgagataaagaaaatgtgttacttatataccacggaacactatgcagccataaaagaaagttatgttcttggcagcaacgtggatggagctggaggccattatcataagtgaactaagccccgaacagaaaaccaaatgctgcatgatctcacttataagtgggagctaaactatgaatatacccgaacatacggaaaggaacaacagacactgggaatgactaccagaccaaaaaaaaaaaaaaaaaaaaagaggatccaccctgtggatcctctgcccactgcctgggtcatgaggttgttgggaccccaagcctccgtgtcatgcaatcaacagatgtaactaacctgcatgtgtaccctttaaactagaatagtaagagtaaagagcattgaaagaaaaagtcaagatcagaagcgaagaaaataataaatgaaaaaacacaatctatagttatccaaacaatccatgactgtcacaaacacagaacaaggacccagtggacagaatgaggcagccaaatactcaacccaacatgatacatagggaacacatttttcaaaacaccaaaaagacacaatgggaaagggagagtctggttcaagaagtgattttgagaaaactgaatatgcacatgcaaaacactgaaataagacctttgcattgcacgatacacaaaatcaacacaaaataaattaaagacctaaactcaatcttgaaactgcaaaggtcttataagaaaacataggttgggtgtatattttaggaagcctgtatctatgcacacaggctgcaaaaggtgaaaaataatcataacactaaagggaaaattaggggaactacatgcacagacaatgcaatggcttggctatatatgtgtgtgtgtatgtgtgtgtgttttgtagggtggaggtttggatacaaaaattacagctaacatgcaaatataaacaaagacactagtgacactttagaacttctacagggggaaagaaacaatgaaataaacaaacaaacaaaatgcatcctaaagactaggagagaattatggaaagtcctacctctgaaagagattgttatctaacacctacaataaactcactctactaaatgaaaaacaacaaaaacaacaacaacaaatacccaagctaagaggatctgaatagacatgtgtgtaaagaagacaggaaattgactcacaggttaacagtttctcaatatcactaatcctcacaaaaaagtgaatcaaaaccatactcaggtaccatataattccagttaaaatgaatattgcaaaagataaaaataaaaattgttggaggtgatggctggtgtagaattgcaggaaggaaaactgttgtacgctctttgtgggaatgtaaattagtatacacactatgcaaaactgttggaggttccttaaaaaagtaaaaggtcaaagtacaaccaccactccaggttaacaatcccaccactgggtacacatttagaggaaacaaaatccctgcattgaagaggtatctgccttcccatgtgtcctgaagcactagtcacaatagtcaagatatggaatcaacctaactgtccatccacagatgaagagataaaggaactggatatatacatgatggaaagcatttcagccataacagtttgggaaatcattgatctgcagccatgtggagaaacctggaagacaattaggggaaatgaaatgagcctgttagagagagacccatactgcatgacattaggcaaatggaatccaaaaaacactgtcttctagaagcagaactttcaataggggttactagaagctggagagaggagggggcctgggcagggattggtaatgggtacagagtaacactcagaggagaggaatccattctgatgttctattccacagcagggtgaccagggtcaacaatgtctaggggaatttttcaaaaacagctggaaaggatggttctgaatgttctctccacagggaaataataagaagccagacaccatgatttgatcatgacactacgtatacatatatcaaaatgtcccttgcaccctctggttatatacatacactctatagtaatgaaactgccatcaaatgttggtagtattcattctaactggagtgacatagaatctgagtgtggttttcaatcatgttttggtgtgaatcggccatgttgataatcttatcttttacctgtgcatcaacctcatgtcttcaggtcctctgcccacttttacacatcaaattcaaaacaaattaacaataacatggcaaatataactaatcacacacacacagaaaatgaaaaccaccactcagattccatctcactctagatggaatggatactacaaaaaaaaagttgaaaaatattaaaagacaaaaaaacgatggtgtggatttccagagggggaacttgtctccgcagttcgtaggaacataaactagtacacacactaaagaaaccacttggaggtccctccaaaccttaaaaccacaactaccatttcatccagcaatctactactagtcgtatatacagagtacatgaaatcaagccatggaagagattatctgcgttcccaggtggaatccagcactatgcagaatggccaagatgagaaatcagccgacctgtccatctgcagatgaagggataaggaaactgtcccatgcgtagacactggaatactcttcagccagaaaaatacaatgaattcccatcacgggagccacacggttgcacctggaggacatgatggtaaatgaaatgagccaggcagagacagacaaactttgcatcctctcactcatgcagaagctgagaaactttatctcaaagacctagaaagcataatcatggttaccagaggttggggggaagaaggggaaggggcaaggattggaaaggggtagaaagttccacacagatgagaggaaggaaattctgtttttctattccacagcagggtgactagggttaatagcatcattacatcttcaaaacagcttgaaaggaggatactgaagcttctcgccacaaaagaataaacagtggtacgaaataacagaaaaaataaataccctgatttcgtcattccacaatgtatgcaaagaccaaaatgtcgcactctaccctctcattgcattcctttactattcagcaaatttgtttaaagaaatataaatacatgatgctagaattcacatgggaccatgaatcaccctgaatttcttccaaagcaatcctgagacattcagactacatcagatgcatctcacccaccgatttcaaatttcatggaaaaactgggtacctgcttccacacagagcagtggaacacaagagagggcccagaagtaaactcacacaccaaaaaccatctgatccttgacagaatccacaacaataagcaagggggaaaggatgccctattcaaacaatggtgctgggataagtggttagccatatgcggaagagtaacactgggccccgacctctaaccagacacaaaaagaaactccagatgaatgaaagatttaaatggaagacctcaaactattaaaatcctgcaagaaaacatacaaaatacctttctccacacaggttttggcaaagaatctatttggctatgtccccaaaggaaatgacaacaaaaatggacaagccatgcttaatactctaaagagccaccacacagcaaaataaattagcaacagagtaagagacagcatacagagtgggagaacatgttcccaaactgcatctgatcaaggtctaatatccagaatcttcaaggatcttatgccaatcattcaacaaaaaacaacaaaaaaatcccattagtgtatgggcaagggatgtgaacacacacttctcataggacaatgtgcaagtgaccaacaaagagggaaacatgctcaaactcactcatcaacagagaaatgccaatcaagagcaggtcgagataccatcccacaccactcagagcggcgatgactatgcagacaaagaaagaaagaaagatactggcgaggcagctgaggagaggaaaggctgatatggtcttggtgggggaagcaagctagtacagacactgtggaaagaagtttggagatttctcaaagaacttagaactaccatccaaccccacaatccctctcctgaagatctacccaaggaaaatatatccttctatccaaaagacacaggcacttgtatgctcacggccgtgttattcacaatggtaaagaaacggaatcaacctaggcatccatcaacagtggataagataaagaaaatatggtatgtatacaccacaaaacactacacagcccccaaaaatcacatttttggcagcaacatggatggagctgcaggtcattatcctaagtgaactcaaggccagaacagaaatccaaatgccacacattctcacttataagtgggaactaaactatgaatgcacctgaacgtaaagaagggaatgattacattaggaataactaccagaccaaaaagaaaatgcaaatgggagggagggggcgttgcgtcctgaagacccaccttgtgcgtcctctgctcactgcccgggtcatggagttgttgggagcccaagcctcagtattatgcaaccaacagatataattaacctgtgtgtgtactctttcatctataataaaagtagaaactattacacacacacacacacacacacacacacacacgaagaagcttaagagctacataaacaaaaaaataagtaaaatctatagttatccaaacaatccctcactggcaaacacacagaaacactaacctatggacaaaatgagaaagccaaaaatgcagcccaaaattacatatggtgaatgcatttttcaagagaacaccaaatatcacaacagtgaagagagaagtctgctaattgtctttgagtaaaatgaatttctacctgcaaaacactgaaatggatcctcatgttacataagacaaaaaaatcaatgcaaaatacagtaaagatctccacccaaaactgaaaacacagggtgttttcacaccctagaagaaaacacagggtgagcgtttacttcagtgaaactttaatctatgtacacagattgccaaaaggaaagaaaacaaaagggaaaagtaggaggaagaaacccacagacaatgcgatcttttttcctttttttttgtgacgggacaccaaagtcaccacatgcacatgcaaatagaaacacgcaggactatggaaagctttagagatgttccacaggaatgaaaccaatgaaccgaaagagaaggtgtcctacagatttggagacagatctgaaaaactgtatctctgaaagcggttgttatctaacatgtccaagaaactaacaccactgtgtttggaagcaacaacaacaacaaaaaagacaaaacaaaacaaaaacacaacaacacatatgctgaagcaaaactgggcaaaggcccttaatagacatttctgaaaagatgacatgaattgactaatgagtcaaaaagaagttgctcaactttatcatttctcccgcaaaggtaagtccaaaccacagattctctgggattctggagaatgtgaattctgactcagtaggtctggagtgagcctgagattctgcgtttctaaaaggttcatttccccacaaatccacattatgtgtattaatattaccaagtaaataagaaaggtcaaaaataaaatggcaagccattagtagataaccttagtcttcctcctcatcctcctcctccactgcatgggttaggatggtccccagcatcctgatcccccaggtcactgacatcagctcccaaactcatgccaggaatgtccttccctcttcttccttcaggccataatgggtatctatttttccagcatctttctcccaatctgtgctgatttagccaccctctgtatctgcctccctgggacaaagggtcaaactcaccagcactctgagcaagagctacagcagctgccacatagactatccccagcagagctcagtgatggacaccaggttcacaatgccagtgggcagtggtgctgtttactgcatccagtggggatggagtggttgtccaggcacagacagatggacaatcacacagcaggaacaaatgtacattctgaaatttaacaaagacagaataagggactcttggggaatagaggtctcaattgcagacatagtgagtgcctcaaaaattagagaactggggccatctctgtcatggcccggattcctctctccttcatcctcctcagtcatcaaagagattccattagggggcaatcaaaggatgctggggcctgctactagctcccaaaaaacaccacaagcatttcagcagggagaaaagaaaatgctcacaaggatggggttagatttagttataaaccagattgtgtggcaggagggaggacatatcccccatcctttggccactccaaaattgggagagctaatctggggaaaggcaccaacacctattcattagtgtctcggtcctgtgtgatcatgggtctgtgtgagttctcagcagctgcctctctcaaggtctccccacaggacagcagggtgaaacctggggcaggaagagaggggaagctgatttgcataaagaactttttttatcctattgggtctggggaggcatgaaaaggccctgaggaaaacaaaccccagctgggaagcctgagaacacttagccttcatgagtgtccccaccatggcctggatgatgcttctcctcggactccttgcttatggatcaggtcaggggaagggactctatccctgggggaccacagaaaacagggtccaggttactctcatcctcatgatcataactgtgtctctcctgttcgttttaggagtggattctcagactgtggtgacccaggagccatcgttctcagtgtcccctggagggacagtcacactcacttgtggcttgagctctggctcagtctctactagttactaccccagctggtaccagcagaccccaggccaggctccacgcacgctcatctacagcacaaacactcgctcttctggggtccctgatcgcttctctggctccatccttgggaacaaagctgccctcaccatcacgggggcccaggcagatgatgaatctgattattactgtgtgctgtatatgggtagtggcatttccacagtgatttaaacctatgaggaagtgcaactaaaacctctttatatactgagaacagttcagcccttacagacaggagggaaagtgagagggtggaaatggtcaacacggtgagtgaggagtctcctcgccccagtctctgacgcaggggttcactgccaggtgcctcacccagtctctccccgggtgtgtccaccttcccagtgtggcttttccatggctgtgcttcgtctccactgagaataatgtggagggagaattatctacaaaatatataagctcacagtgagtcacagacaccccagtgctccaggaagacgcttcttattcaaagagaattaacaggcatatgctcactcattaatttgaccatggaggctgactgaatattttatttatcactgaagtgggagcattttcaaggggcttgttaaaaatgtaattctctaacctaaacctactaagtcagaaacttgtgttggtgacagatagcctgtatttaacaagctgtacatgagatttttattagcgttaatgtttgggaagaacctacttttattatcataaaattattcataaggatctccatttataatgatgtcaggttaatattccataatcctactctcctaaattcccattcaaagcccccaaatactcagaaacagattttaaatctcaagccatagcaaaaattataacttgatttatgcagacagagtagggaggaatttctaaaaccgtaagttcctaggtgccaggtgtgctgactcatgcttataatcacaatactttgggaggttgagacaagaggactgcttcaagccaggagattgagaccagtgtcttccacatagcgagagtctatcaccacgaaagaaaaaaaaaagatataagtcccttcaggaatttccaaaaacttgtttccttagggtatatttagtggtccatatgaacatctgttactgaaaaccatcccgtagaggactggcttccagaatcccttctccctcccactgagctcacctacctgtggctctggctctcagggtctttataggacacagggctcagcctcttatcaccgattgttccacaggatcatggttccactgagatcctctcagcatagatacgtacctgtcctgaacagtgtcttttaacataatgttggcaagatgggaaggactaaggggtgacggagccttggagccaccagaagatggcagtaacctcactgctgagctttgctaggccagactcaggctcccaccctcctcccttcctctgactctttcttctggccacccggggtccaggagctttttccactcaatctgggctcaggggtcacctcagagaacctctcaagacaaaggaggtgcttcaggggatctaacacaagtgagggcagattttaagactgtccatgcacagaaaatcctgtgaaaagaaacaaaccagccctacttgtgtctgcgcacctgagtccttaggactgttttctcctgatctcctggctgagtaaagattgcaaatgtgcggttcattatccagatccagagaaatccatgagagtttatgaagacaaagacgacaactaccctatctacttgtcacacaatgaagacactggccttagatctgtcagtgccctggaacattctggaagaagagggtgaaggttacttggcatacgttgggactcaaacatgaggatctcatgatgacccagagggataaaggtgggatcagttgtgagggtggaaaatgtggatttcttaaggccattttgttaatccttttctcattgcaaaggatttaaactgaaatgaacacgatttttctaataaatgcttatgaggctttccattaaatttaatcatatttcctgcctttatgaaaataaatatagaaataaaatatacttccataatgcattactgattgtgtatctttaaactagagggaaccattacttctaaagaaaaattactaggattgtttgcattttaatctgggatcctacatgatggctacagatacagctgttgttcaaggttttagcctggaatctctgccaattcaataacggaggcaataaaaatagacactagtattataaagacagaattcatttattttgaaagttttgaaagctatgaatatctaccaagaataaaataaattgtactgaaaatatattagaatgaattaaaaaatgccaaattcacaactaataaaatttattataaagttaaaaattcttatatttttctgtctcagtataaaaaataaacatttaatgtatctattagaaaataattagcaattttgtaaatgatatcaaagaaaatttgaacaaatggtgaaatattttcttatctgcggacaccaaattaaaaaaattcaggccaggtgcagtggctcacacctgtaatcccaactactttgggaggccaaggcaggaggatctcttgatccaaggagtttaagaccagcctgggcagggacgggtgcagtggctcatgcctgtaatcccagcattttgggaggctgagacggcagatcatgaggtcaagagatcaagaccatcctggccaacatggtgaaaccctgtctctactaaaaatacaaaaattagctgtacatggtgacgcatgcactcctgtagtcccagctacttgggaggctgaggcaggagaatcacttgaaccggggaggcggaggttgcagtgagccagatcgcaccactgcactccagcctggtgacagagcgagaccccatctcaaaaaaaaattagccaggcatggcttcatgtgcctatagtcctagctactagggaggctgaggtcggaggattgcttgagcctgggaggtcgaggctgctgtgaaccgagattgtgctactggactccagcctgggtgacaaagtgagaccctgtctcaaacaaacaaacaaacaaaaaaccaaaaaaaccccaaaataaaacaaaaattcaacagcatgtagattagtaatgttagtgctttatttttaaaaattattgttaacttatatgggttttcctctgagaaggtgcactggaaggtgtcagcagagcagatagcacaaactcctcagatttcagaagcaggggtttatggtaaatgaaaaatgccagtcacttgtcagcatgcacaggtggctatgcccgccctgtgtcaggctctgtgtcagtagtagggtgctccatgcgtccttttcagagtcctacatgccatctatgctcactcagccaggcctgtcacctggaagtaacaggcaactcctcctgcactggaattagcagcagagtcaggtgaataatgtggcctggccacaccacctctcagcaaatgtccccagtggtgatgcccgatagttcccaatcctccttaagtaattaattcacttcaattgaattaaaaaaatcaatcacttccctatgacacacaaggacattcactctctggctttaactatccttgcctgccttgttattatcattccatgtgcccaatactgtcaaaagatgtatttttgccataccctccacatgcatttcatatgtgtgatttttattttcaaattctatatctcttctaggaatatggtgtgttttatttgtcctgctgcaggactcccctctccactcagattaaattattaaattccagataaaaaattaacttggaatactgttgaatcaatagtagaagtaaccaaaataataaagatatttcaaaatgaagattgatttttaaaagtaaaaatgtcacatactccacctagaagataagagactgtactacaaattcattagaacatccccttcatgtcatgggccagtcatgtccctgaacttaacctctgtcttctcgggtgatgttacaggccaatgcagcatcagctgcccacactcctagtggtggaatctgggagcacaggcaggagtctgcgcctgtggccttggctgggtgaaagatgacatttccaagacttcttgcttggcagccatcctcacgtgcaggtggtctggcagcagcactgcaaaacccaggcaagggatgccccactgcaaggcccagtggtaactgtggtggccattggcattgggggcagatgcagccatgtgagttggtgggctgtggcagccaccctaatgatggtttccacccctcccagctggtggtggctaaaaccacccggtaggagtttcaaaagcagtggcaccattaagcggagctcctggaggaggactggaagcaactgcttgcattgaaggaatgtagctatagtggaattattgaaccacatcatatttgcaaagatgcagaatgtattacagattacgagatatggaagttgaggttaatctggtagagagcagtgaatatgaggaggaagctctctattgggcgggtgctatcatagctgcagaaggtgatggtgcaatgcttctgccagtgagtaaagtcttgtacaaacttaaaccagttacggggtaaaatctgatccaggactacctgagggtcacttatgttggcctgttcaatacacacatttctttccaggagccttaccaaaggtctatagtagtgagttcagtatggaggcagtaatcagatcatatctggaaggaactggcataaactccaatcctgtgggacatcatggacagcaactaaattcgaatcaacagagtagagcccttgacattggacaagttcgtggtgaaagatctgaggctttaggactccgacatttgtgaatgacagcactaaatgaagtctttactggtgaacgtctatccagaataccttatgcttgggctgtggcagtggataatttaagtagacccactctatttatttatttattttgagacggagtcttgctctgttgcccaggctggagtgcagtggcgtgatctaggttcactgcaagctccgcctcccaggttcacgccattctcctgcctcagcctcccaagtaggtgggactataggcacccatcaccacacctggctaattttttgtatttttagtagagacagggtttcaccgtgttagccaggatggtctcgatctcctgacctggtgatccatccgccttggtctcccaaagtgctgggattacaggtgtgagcctctgcgcctggctaagtagacccactctaaaagactggtttcttactgtgagatttcagttggtaatggtccatgggaaaaatggaagacttcagggctcaatttgtgaactggagcaagatcaaaggcaacagggttgcaagtcaggctgtggagcatgattaaaatattgcaaatgacaaggacgttggagtcttgcattcaactgtaaaatgacagaataacaaataaatataatgaatcattgttctagagtccaaaaagggccaaaagtaattttcagtattcaagaactaaaaagcaagcagttttctcgagcacccatgagcattgtttctcctgagagatttgtcctcgttttcattgctggaacacctgcatggttgtagatggaggaatgtcttttgatgttcctatttttatatcagacaagctttaaagcaacaacagttataaaagacaaagaaggaaattttataatgataaaaggatcggtccaacagaacaatatcacaatcctaaatatatatgcacctaatactggagctcccaaatttataaaacaattattactagacctaagaaatgggatagatggcaccacaataatagtaggggacttcaatactccatggacagcactagacaggacatcaaggcagaaagtcaataaagaaaaaattgactttaattatatcctagaacaaatagatttagcagatatttacctaacattctacccaacaacttcagaatataccatattttaatcagcacatagaacgttctccaagataaatcataagataggccacaaaacaagtctcaacaaatttaagaaaattgaaattatgtcaagtaccttttcagaccacaatggaataaaactggaaattaactccaaaaagaacccttaaaactatacaaatacatgaaaattaaataatctgctcctgaatgacctttgggttaacaatgaaatcaagaaggaaatttaaaaattgcttgaactgaacaataatagtgacacaacctattaaaacctctgagatacagcaaaactaagaggacagttcatagcattaaatagtctgaaacagcatgaacagacaatctaaggtgacacctcaaggaactcaagaaacaagaaccaaccaaactcaaacccagaagaaaagaaataacaaagatcagagcagaactaaataaaattgaaacaaaaaatacaaaagataaatgaaacaaaaactggttatttgaagagataaacaaaattgacagaccgttagtgagattaaccaagaaaaaaagggagacgatccaaataagctcaattagaaatgaaatgggaaatattacaaccaataccacagaaatatgaaagatattcaaggctactatgaacacccttatgcacacagactagaaaatctagaagagatggataaattcctggaaaataagttattatttgaaaaagacacttgtatggccgggcacggtggctcatgcctgtaatcccagcactttgggaggataagcgggcggatcatctgaggttaggagttcaagaccagcctggccaacatgttgaaactccatctctactaaaaatacaaaattagctggacatggtggtgcatgcctgtaatccccgctactctggaggctgaggcaggagaatcgcttgaacccaggaggtggaggttgcagtgagccaagattgcaccattgcactccagcctgggcaacaagagcgaaattctgtctcaaaaaaaaaaaaaaaaaaaaaaagaagaaaagaaaaagacacttgcacacatgtttatagcagtacaatttgcaattgcaaaaatatgcaaacagtataaatatacatcaaccaatgagtgaataaagaaaacgttatttttttatttttagacggaatttcgcttttgttgcccaggctggagtgcaatggtatgatctaggtttaccgcaacctctgcctcctgggttcaagtgattctcttgcctcagcctcccgagtagctgggattacaggcatgtaccaccacgtccagctaattttgtatttttagtagagacagggtttctccatgttggtcaggctggtctcgaactcctgacctcagatgatctgcctaccttggcctcccaaagtgctgggattatgggcatcagccactgcacccagccaaaaatgtgattttatatatatatatataatatacaccatgaaatactactcagacctaaaaaggaataaaataatggaatttgcagcaacctggatggagttggcctcgtttactactctgggtttctgtctgaggatgagggtgatgattgctgatcaggatgcggaaggaacccagtgctaacccacagcatctgccccacagggaaataaggcacaagtctcttgtttgatcccacgctatgacctctagacctactcttccctcttgtcaccaaaaccacaatcaggaaaaatttctgcaggcatttcaccatcctggaacaaggatctgagactcttcactgaatttgtgaccttctatccagccaatatttatactgagctattaagattaacatcttagcctggtcattgccacacaggcaggcaaggcagctcaggtggaaaatacttttggtcatcccatgtgtctgggcatatggccttgatgtgagtttatgttcatgctcaggacaagttatgggtcaggggactagtcagcttatgggccaggaaaaggtgctaaggtttgtggagtcaaagagggaattcacacatattaatgctccttgtttccacctaaggcagtttgtgaagtctgtgggttctgtgactgtccacaaatggagcaggaacattccttagaacggatgattgggaccccacaaaggaaaagacaagaggaagcacaggctacacaatgaaaatacacttggtcatgccaaaggctaggtcatgccaaaggctaatgaaagagctttgagtataattcagtgcctttggggttgagtggaaaatacaaaaaccatctttgccctgctctcacaccacaacaatcaacacgtttccatgaccaaatgtgtaggatttctccccaccccctagaaagcaagccattggttttgcagcggacaccacacaggtgccctctcattgaatgcaattctgacactatccacatggagacagggtcagatcttacagtttgagggctacttccccaagactgtgccccactacttacgccaatcccaagcctcagattgctttacctgtgcttctgtccaaatagctgtaagttgaagatttcacaacatctccttggcttctattaatttgctagaatggctcacagagctcagtagacacttacaggtttattaaaaaggatacaaccaagcatatagatgaagacatgcatagcacaaggtatgggaagtggtgcaccaccgtccagtaatcttcatgtgttcagccttccagaagttctcccagcctagctccatttgggttattttatggacgcttcctcaccgaggctttatggagtaaaccactgcccattggtgaataatcggcagcccctctcccctccacagaggttgggagatgaggctgaaagtcccatccctctaacactgccttggtctttcttgtgacctgcccccatcctgaagttacctagggactgtcagccaacagtcatctcattagcatacaaaaagactctggtgattttaagtattttaggagttgtataacaagaaatggggtcaaagaccaaaaccataatttataataacacagggatgaaaaagaaagtagaggttgatgatttcaagcccacactagtcctcattatgacagatgtggatttccaacccataagaggcaggaggctgaagagctgagacgaaacctgtgaaaagcagggacaggggacatttctcaatttcttgttactgaagtgatagagctccaccaggcctcacttggattgacaaactaaattaaaagatacactctttaaataaaaagcacttctgagcatacatccaaaagaatgaaaatcaggatattgcagaaatatttgcacatttttattcatgcagcattaatcacaatttcaaagacatggagacagcataaggtccactaatcattgaatgtttacagaaaatgtggtgtatagctgcaatggatgctgttcaaattcaagaagaattaggccgggcacggtggctcccgcctgtaatcccggcactttgggaggccaaggcgggcggatcacaaggtcaggagttcaagaccagcctgaccaatatggtgaaaccccgcccctactaaaaataccaaaattaactgggtgtggtggcagaagcctgtaattctagatactcaggaggctgaggcaggagaatctcttgaatccgggaggcagaggttgcagtgagctgagattgcgccactgcactccagcctgggtgacagagtgagactctgtctctcaaaaaaaaaagaataattaaattttgccatatgcagcaacagggaaaaccctggaggatattacactgagtgaaataagccaatcttagaaggggaaatgctgcacggcctcatttatatgaggtatctaatttttttttttcgagacagagttttgctcttgtcacccaggttggagtgcaatggcgcgatctcagctcattgcaacctccgcctcccgggttcaagcgattctcctgcctcagcctcctgagtagctggtattacaagtgcctgccaccacacctggctaatttttgtatttttagtagagacacagtttcaccatgttggccaagctggtctcgaactcctgacctcaggtgatccgcctgcctcgacctcccaaagtgctgggattacaggcatgagccaccacgtccggcctataggaggtgtctaatatactcaaccgagcagaaatggagtagaatgctggttgccaggggtagggagagaaggaaatggggagtcactgctcaagggctatgaagctttaggtttgcaaaatgaacaagttctagagatgtgctgtacaacactgtgcttacagctgacaacactgtattatgtacttaaaattttattcagagggtatatcacacattaaacgttcttattaacatgaaaaagggatagaaaataccatgaaaccacttacagaaagcaagtatggcaatcctctgtcctttgtcttgggagaaagttttggccaagagacaatttaggcaaaaaagagaatttactgaagaaaaacagagagcaaatagtttatttagagagacagtgtactctggaagataaggcagagcgggctgctgatagagaatgagccagcggcccgagaaatgtgcactgagtttttatgatattgcactttttcttggagttcccacctctgttttaagtctccacctttttttctttctctagtttttctgcttcagccttaagtccctgccttttccccacatagtttccagcccaggctgtgggaccctcccttaacacacacatgggcccagtgtttgataggaattctacctaatggctgcattgctcattactgccaccccaggaaggttgtatggtggtcaaatctatacttactgtacctgcatctctcttagaaatttctcctttgctctcacccctattatcagcatgcagctagctacattctgacaggttaacttcagagtgagtgaatactgggtgtcttaaggggctttgttctggcataggtatttaccctaatctctgttcgtatctagcatgtgtgctttgggtggtctctggggtgtgagattttccagaactcccttttctcaggggctgcccctcctgcttctgtctagctatctgcctactctaaagttagtattagtatgaaagcttttatgaaaaacatttttttccaagaaaagggaggcattttatactggtgaaataaggtgttcaatgacaacacataacaactgtaaattgtatgcacctaataaaatagctttaaagtatttgaagcaaaactgtctcttttagcagaattaaaaagagaaataatcaatccataatcatatacacagatattaatacaactctcttattaactgagtgaatgacatggagaaaaaagagtatacatacaaatacgtgaaaaccatgattaacaaaatcaatccagtgacaccaggaacccaagcctgaagggtagttgcttgagtatgcattcatggatgaacgcatccaatgaatcatcacaggaacaaacaattgaggccttcgtttatgtatttctaactgatgttaagtttttccttcctattctgtgagtagaggtggatccctgtggaaggagctgcccgggtctttgctccagaagctgtctgcattctcccctcactgtagcctcgtcacattaggccattgttatatttcccatatgtccttcttctagtaatccaggagccctcaatgaaaaggctgtttattaataccagtagctcaggacagagcaggggcatggctcatggatggtttggaccaggcccttagatgactgcactcacatgattcccactgagactgcagtctggccagtgagcagcaggggcactgtgggtctgtctcacggtctgcacagtggctattcatagctgtgccaacccctaaattccccagggctgggcagtggagcctgcactcactgaagccgactcagctgctgcatcttctctgggtgtggttccagcacccacttcctcccaggtcctgccagactctctcatccaccagtccccaggtcttgaataaatgcatagagtggggtgggggcaggcagtgggtgggacacatttgcatccataacccttcctctgtgaggccagtggaggggataagagaggcctagggcagccactccagctctggacctcgggagggctgtgtccaccatggccggggcccctgctcctccctgctgctcccctctcacttatcaggtagggacaggcctcagattcctgggaaagcctcccagtctgagttcttgccccgtgttccactctcacatttcatccctgcttactcacccatgagcatttgtgtttgcaggttccccccacctcggcctgttctgactcagccaccctccctctctgcatctctgggaaattctgaggctcacatttaccctgagctgtggcttcactgctggtggctagcacatatcctgctaccagtagcatctagggagtgctctctagtatctcctgagagatgatatatctccagtgggatagatatctcaagagtgggctcctgataaaaggataaagttcaaccctatttactcattttcacactcttctttgccctttttctctgagataatgcagcagaaagacccttgccagatttcagcatctgcttgtggacttctaaggtcacagaaatctcaaccaaataaacttttagtctcagtaagttacccaatatatggtattctattgtatcagaagaaaatggagaaaatggactaggacagcacgtgtagaacagtctgctaatctgactcaagtaagcaccatggctccagggtccccggtcacttttctaaatctaaagatgcctcagccaatgcagtaattctgcacatctctgggctgcagccagaggatgaggctactacatatctcagcagccatggcacttccacagtgctccagacccccagggaagtgagactaggacctcccctgtgttctctctgcctggtgcaatcaccactgtcctgcctgggaccaactctggctcagggattgattcctgttgttactttttcagccagtgtctaattttcctaggatatatagatgtaaaatgtgtttttttcttaaaatgttaatttgatatatttttcatatcttttccccttatgatgcctacagtggagtaggtcagttcttagagctaagtttccctccaggaagattacagaagaggaaggagatgaataacctacacgtgctgtcctagtccatttcccccattttcttctgatataatagaatatcatatgttgggtaacttactgagactaaaagtttatttggttgagatttccgtggccttagaagtccacaagcagatgctgaaatttggcaagggtctttctgctgcattatctcagggaaaaagggcaaagaagagtgtgaaaatgagtaaatagggttgaactttatccttttatcaggagcccactcttgagatatctatcccattgccaggataagggcactaatccattcatgatggtggaaccctcatgacctaatcacctcttaaaggtcctgcctccaattacttttaccatgataattaaattctaccatgagttttggaggggatattcaaaccatacacatgtcccaaactagggcctagacctgacttagagatgtgtgtggtctgagaacttctgatcagctggttggtccagcatgccccaaccccagctccactgaccagctccaggagtgagtgaggtcaccttcctcacaactgctcattccagcctgtctctgaactgttcactcctcttgaggttcagaggatgcaggtctttgtggttccagggatgttgggcaaacagtcttttccacagtggaatatgactgtgcttgtgacttcgcagtgtgcagaggacactcagcacctgcctctcccccccgactttgtcaggcccatgattatcaccctctccttcatcccaagttcatctgatacgcatgccaagatttcagtgaggctggggacacataaggatgatgatactaaaatgaacaagttccatttcataatagtggcagaagatcagagatctgtaggggagttgtgcccccactctgagtatttaggaagcaactctagggacatcttgctctgcttctcccttctctgcacaggtgaaagaaggagcctgtgcagacaatcgttcattagaagctcctgccttcttcctcttttccaccccctaggactggatggggcctttgtaatggcttcaaattatagtgagagtcaaacaagacaattggtcaatgactccaacatccctctcagggctgcctgacatgagacaggatggattgcatctgatacacccccacccttctttcttatcggtatattaggtttttcttattgatgtgaacacactctatattacacaaaataagttatatttatatttcaaacctgtgatggtgatttttaaattatagtaaaaatatacatataaaatttaccatcttaatcattttaggtgtacagatcataagtattaactatattcacattgctgtgcaacagatctgcagaaattatccatcttgcaaaactgtagctattgaataacagctccccattttcctgcctcttgtggtggttttaaatacaatgcaatacatactagctgaaaatggaaaaaagaagtatatgaaaatgttaaatgcatagcacaaaaaatgaataatagggtcactttggttataactttaaatgagaaaactcaaagtaaaacaacaatctatgatatatcatataaaatgcacaatttaaaatttttaaaatttaatattaacaaaaatatatgtaatacaccacataagtattcaataaaactgaatacaattatgtttaatttttttaaactgtgaaaaagatcctattaacttttgaatatttacgcaaggaaaccaagtacatctcttcttgaaaaagtttgattccaattttttttttctttttttttttttgagacagagtcttgctctatcacccaggctggagtacagtggcgtgatatcagctcactgcaagctccgcctcccgggttcacgccattctcctgcctcagcctcccgagtagctgggactataggcgcccgccactgtgcccagctaattttcttttgtatttttagtagagacggggtttcaccgtggtcttgatctcttgacctcgtgatctgcccgcctcggcctcccaaagtgccaggattacaggcgtgagccaccacgcccagccagtttgattccaattttaacagacaggtgtttttgacaaccagtttattttcttactgaaattttctttttctttttttaaaaaattttaaatctttaatttccgttttcacttattttcttcttgcttccaaaaggaaaggagtgcgtagctctgttgcctgtacatcgtccacagcccctggctcggggcagggtcccctaggccgcccgggggtccacatgcagcccctggggggccggcgcggggtgaggtccggccggttggggccgccgctaggcgcgctggctgggcagctcctgggagatgaagcgacgcaggcgctccaggtactggctgtagagctcgatgtcgttgtgtccggcgccctccacccacagcggctccaccgccttggggcagcgctcgtagagcgccagcccgtgtgagaagtcgatcacctcgtcctctatgccgtggatgatgagcacgggcgacgtgatcttggacaccttctcgatgttagggaaggcgtcgaagcagtaggtcttggtgtcggggaaggcgacgcgcatgcccgaggtgagcggcgagtgcagcaccaccgcggcacactcgtagcgcgaggccaggtccacggtgggcaccgtgccgatgctctgcccgtacaggatgatgctgtccgggctgatgccgtacctggcggcgccggagcagggtcagccgcggcctccgaggcgcgcgcacccttcccaccagcgggcgtccccgggcccagctccggatgcgaccctctagtctccccactcagccaagtcagtgggtcaggcccaggctccacaccagtcccgagggccacccccagcccccaacaccgcggcggtgggcgaggccagcggccccgccccgttccctggcgctgccgttcactggcgtttcctagcaaggatctgcagggatcccgcctacggagtgcccctggggcaggggtaggggaggccctggcgcctgttctcctcctggtcacccctaggtgcacactgggaactgtgtgccccccacatcctgaatgcttcaggcctccctgcccgggttagaaagccgttcctggtgcactggccaggacagcggacactcttccttcctgcagcccttgcccacccccttggccatgaggaattcaggcagctgtgtccccagatgtctccacccaattttggactctcggagtccccacgcccaatgagatgccagtgcaacccaggtcagcatcgaaggtggtggctgcggaggtggcaccccctcccaccagcaccttcccttgggagtggacaagtcctcggccacctcagcaccaccagctcccacccagggccacccccacccccaggtcattggtgtgcggcccttgacccagctgatccagcaccagttacaaggcctcctcgtacccagtcccaaccacgcgggacccacctgccaccctgcccatgccaggaccccacaactctcctcccacacgctccaggctctgatcccaggcagacaccctcttgcaaggcaggagcatgggcaggtgtgcgtcccctctgcctggcattcggactccaccagcagggctgtccccgtccctggcctggaatcccagcctcctggcagcactccacagctcgccactcacccatgccccaaaggatgctgcctggctggtacctgtggccccagctctgcctcggcctccctggcctgctccctggcagccatggtcagtagtgtgctgagccagcccagccctgtcacctgctacaggcaggagcccccagctgccacctggatgtccccactcaaatgaacgggacacatccccagtggaggccctgggcacgctctggcctccccctcacagctctgggcctaggttcctgcaggacaaagtggcagcaggacagatggccgagcagacgagctcagagctggccatggcgggtgtgactctgccagtggcccaggcagtagagacaggaggggccgaggaagtcgcatgaagtggtacttggtgtcagcgccccacactgctgggaggcccccagagccagggtggtgccaggggaccagctcccaggcccacagcagggaccgcctgcaatatcaccaaggcaacgaggaccccacctccccagggcctctgacttctcagagttgtgcctggtcccctgtgggagcaggtcagaccagtgggctgggcagggccaggatgagacagccccagtggatggcgagcaggaaaggccgccagaggcccacccgggtctcctcgtccaaagcagcactggcccgggcggtgctcaaacaccggtgaagggcccaggcaagcgcagggctggggacctggatgactaggagggctggatctggaatcgaggctggcccagacctcgggtgtgtgctgggggtctgcaccttaccctgcaggccctgccccaggatggccaagctccgcagccacagggcctcatgggccaggcctcgggacctggatgcagcagcctcgcctcacttggccccaagtgctgccttggcagatgggctcccagccacacgtgcacagacccccagaccaccacccactccctcccaccgggtggcatccacgcccctgtgacaagctcagccccttcccgtcctcaggccaggggttccagggagcctggctccacaggccagggtgtgggaggaccgcctggccacacctcagccatgtggaggtggcacctgcacacccaagctcgcctgtccggctctctggccctgtgcatccactgtggctcccctcctgcagggccgcccaacttcctcccagggaagcccgccccccggcccccggcttggtcccctcttgggtgtgcccaggctgagctgcccccagggtcgccctcacctggtgtgcagggcctgccaggcggcgtcgatgtcggcatagaggttcctctcggaaggcctgcccgcgctggcaccgtagccggagtagtcgtagaagatgttgcaatggaggcgggagcccaggccaatgtagaagctgctcatctggctcaggtccacggcgttgccgtgcgagaagaagaccgtgtacctggcaccaggcacgcagcgaacatacatgcaggagacgcggttgccgcgggcgctcttggtggggaagacctcgatggtgtccagctcgcgctggctgtactggaagtcggcgcgctccgtcaggtgcagcttccagcgcccaggtgcgcccgaggaggcccgcagggtccccgagggggcggccccggccccaccaggccccggctcaggctcaggcaccaggaaggcgagcttggcagcgatgcggccggggcagggcgggcagcaaaggcagcagagctcactcagcgacagcccattcatggcgggcgccgcccgggccgggcctccaccggggcccccgccaacaacgccgcctggcctggcccggcaggggaagcgtgggggtgctccgagtcgcgggcaggggggagagcgcccccccagctaccgccccagacggcagccccgttaggaggccagggcccagccccatcgcggtccaagccgagccccagggagcctcgcaaccacaggtctccatgtcgtgccctgggaagcccatcccggcccgcgcccccgggccccagggccgcgctccatggctcccggccgcccgcccgtgcatccgtcggtccctctgcgccccggcccggcctcctgcaccgccaccgccgcagctcccccacggacggaagtgagtttactgaaattttcaagccacagaaagaacaaaagaagtaatatccattatattgtccaaaacaatagtacctggaagatctggaggcaaaaatgaagcctgagaatagcaggacatagacatatttcataacatagactcacagcagaataatggttatgttggttcattagggaagaaaacactaaacagctcttgcagatacactcaatatacagtaagatagcttgtgattttaacgagttagcaaagcagaacaatgaggcaaaagcaaacagaaacactaaaagaaatccattccctagaatcatttttaaagactttgctagatttaccaaagaattcagtattgacttattctgtctccattttatttcataatggaacccgtctaattttatgctaaatgtatgctgtaaggacaccttgctactctgaaaaaataagggatcagtggataaaagaccatattttattaaaaaaagagtgtgttttgatgcatgattttgtgactctacatttttaagtaaggatgaagaacttggtgattaattaaatgattcctcagttgctcatcaatgccatcagatgccttgaatatactgtgaggacagcatctggaagaaatggaggagatctgagtaataattcagatggagccaatttccacaatcttattttcccattacctgcagctctgaatttaactaagtctctgtgttaacaacttgtattgtttatctgggtgaatgacctcagaagacaccaggcagctggatgcctgcacttctttcgtgctaatggttcatatagtctcctcacccccaacactttgatacttccttgaaactggattacatatgagatagaaacaaagaatgcaggtggcataatgactctcaggagtcactgaatctgtgttcatgatgcattactgtgccagctgcctccctcttcttgtgaaggcccttctttattccttgagatgtgctcatcatgaaatagctacaagcatatcatctgcttgccttgcccgttatagcaaccatgaaaataaatttgcagcatcatatatagcccaaatattctcgaaagatgatcctaatagctctaataacaaaataagttttctacagagtagctatatgtacatgctctcagcttatgtaaacttgtgtttttattgctcttaaagcaaaatttttcctaaaattgagaaaagaactaaagttctttgtcattatatgaagaaagatacagcatctaatattgtgaacttctctattttgagatgttttcagacatcaagactggataataggctgggcacggtggctcacgcctgtaatcccagcactttgggaggccgaggcaggcggatcacgacgtcaggagattgagaccatcctggttaacatggtgaaaccccgtctctactaaaaatacaaaaaaattagccgggtgtagtggtgggtgcctgtagtcccagctacttgggaggctgaggcaggagaatggcgtcaactcgggaggtggaggttgcagtgagccgagatcacgccactgctctccagcctgggcgacagagcaagactccgtctcaaaaaaaaaaaaaaagactggataataaaattatttaacaattcggaacataaatttagaattgaaaaaagctttatactatactatactatactatactatactatactatactatactactaacacattttgtttgagcatggttgccttataagtttttggtagttcaatgaaaataatggctacttgtgagaaaactgaaatagactaggacatagtagatagagatagaaagaacaggtaaattaactgtctatgccacatggcaaagaaagtttacagtacgtagtcattaaacgtacatgcttataaatatataaccaatgatgaataattttaaatgcaatttagcagaattcagaccgttttatattaaacatatatttctgaatgaaatataaaatctattgaatgagggagacactttatatgtgtaattaatctcataaatagagaagacttttacaatagtttgtacactttagctataaactgtaattcaagagattcagtaagagtagctttttgtaacttaaatattctatattttccctgcatacatttttgcctttgatcatgtattttatttagcctgctaagatggtagagaaggtacagacagtaagcttttcaacctgacacataaattcaggttatttgaaaatggaatggtaaagtgttactgaagaacttttactatggttcgcatttggtaatatttcctaattattctataaacaaaatccaaaaaaaccttgatttcataacataaacttctgaggtctaaattaatcaataaaataaatttgttttaattaattattagattaaattatttatttaaataattatttaaataattatttaaataattaaattaattattagattaaatactagctgaggctcattagaggtaaactagagaattatcatcccattaagataaattttgattcagggaagtaacatcttggaagtttactaaatttaaatttaggaggaatttactaaatcaagtaccaagattttatttctgcaccaaatggaagacatatgtaaaatttaaatacattccattacttaatttactctttactatcatgagaattagtatagacagcatattttacacagagcatacaaagccttatcttcattgaattacaagtaaaatatatgtatgtacatataattatatatgtaatttagatattaaatgacagaatttacttatttacctgtgtgtgatggaatttgattctagtaattattccaggtacagtaactggttgaaaatgggacatgaagtaaactgatatgcttacaagtaattacagcaagcgaattcattgtaatgtctccaagcaaagcaagactacccacatgagataagaaatgagaggctacttattttgaccaagttagctcggtgacttggggaccaaggactacatgcacatggatgcttcttttgtacccctacccctgccaaaaaatatgtttccatggcaatatttgggaacccattatttcccaattgatgcttttactttcatataagacaacagttgatactccaaaatcaacttacattttaattaaccaaatacaatgttcctaaagacaaagagaaacatttcataacaataagagttaagccaacagaaagatagggagtatgaaaaaacagagaaaatcaataaaccaaaattaaatgcttgaaaagacaacacaattggcaaatgtttatttaggctaagcaagaaaaaagcagaagagactcaagtttctaaaatcagcaataaaagagaatccatcactgctagtaatacaaaataaaaataaaagacaatgcaatgaaaatcttatgctaaaaaaattagatagcctagatagaatgaagtcctagaaagacacaaactaaaacagactaaaggactaaggagcaatagaaaatctaaatagacctacaaaaggtaaaaagattggattgtaattttaagaacttataataaaattcccatctcaggtagctatcactctgagaaattaatatcaattgttcaccaactcttgcagaaaataaaaggggagagaacacttcccaattcatcttataaagccaggattactctgacaccaaagctatatcacaaaacaatatataacagtatctttcttttttttttttttcagatggagtctcactctgtcgccaaagctggaatgcagtggcccaatctcggctcactgcaacctgtttcctgggttcaagtgattctcctgcctcagcctcccaagtagctgggattacaggtgtctgccaccacgtccggctaatttttgtatttttagtagagatggggtttcatgttggccagactggtcttgaactcctgacctcaggtgatctgccaatctctgccttccaaagtgcgatataagtgtcagccttatatcacggtgagccactgtgcctggcccattgtttaaataaaattaaaaatcttcaacaaaatactggacaaactgaatccagcaacatataaaatagattatacactatatgcagatgtgatttaccccagcaatgcaacattgatttaatatttgaaaatcaatgcatacaaaaatcgcattaatagaataaaacacaaaaatacatgagcatctcaacagaaagtatttgagaaaatattacacattttcatcataaaacactccagagttatggacaagaagataacttcctgaaactagtggtagttatctatgaaacccacagctatcattatacttaccaaggagagagtgaatgactaatcagaatgaccactcttgcaaattctccctttttcaccttcctgctctcatcaccctcttttgctcctccatcttcccaaaaacattttcccccatcttttcccaaagccttctcccctctcctgctgctcaccaccattttatccccctccacctaccccaaaacttttttctcacacccccaccatcttttcacaatgccttctctccactcctgcttaccaacctcttttccccactcctgcccctctcccatatgccactcttttttcaccctccatctaccccaaaactatttgtcttcccaaccctcctccccctcatgctcgccaccatcttttcctcctccatctacccaaaaacttttctccccactgtctttttgcaaatccttccctccctcccgcttgcccattttccccacctttaccaacctctctttactcctcccacttgccaccctcttttccccctccatctgcccaaaaactttttacccaccatcttttccccaccctgttttcacaaaaccttttctccctcctgctcagccccccgtttttccctctcctatttgccaacctcatttccccctccatctacccaaaaacgtttttttttcccaccgtctttttcctattgcctttttgcaatgccttctcctgcttgccatcctcttttcccgttggtactcaccaccctgttttcctcctccatcgaccccaaaactattttccccctcttaccactccggtcgcactgcagtcgccatctcggccaccacccacagtgaggcgagccgcggtgccgcaggctgcagcctccagcatttggcaggtgtcttccttccccttctcctctgcctttaagttgggcacagaagagctgtgtaggcaaacaggaaagaacccgggatggtctgactcccccacctcagcatactttatatgcggagttatgcaaatgagttctgggactacatgttctgattggatgagagaaaaacctctaggcatacttagattggactttgttatcatgttctgactggatgagagcaagtcttaaaacgaccaatcagaacatgataataaagtccaatcagagtaggcctagaggtttttctctcatccaatcagaacatgcagttcaggaattcatttgcataccctccctgtataaagcatgttgagtgggcagagtcagggtcttccgtatattctccccgcaccatccgtgctcggcttagtgcaggaagaggagaagaacgggaagacaaccgcggcacagcagcttacgtgctgatgttggctgtggtgatggagcctgctaccggagccacagtggcccacagcgggagcatggccagagtggtggaaagacagtggggcaggtatgctatcagagctgcgctgcccgcggtgagggcagattgggggcgctatctggggttgcattgcctaggtgggttctgtgcagtatcggggactacgttacttgcggaggtggaacaggggaagggggtggggtgggggggacactattgaggatgggattaggtgtgctatcgggggccgtgctgatcatcaaggcagcttaggtgtgctatcggggcaggggacacgctgctccgagttgggggatgttacaggggctacactgcctgtggctggcaggggttaggggcactatctggggctgcacagccggtagtgggtggcgtgttagggacgctataagctactgtgttgtctgtgccccagggagggttaggtgtggggttgggtgtgctatcggaggctacagtgctagcagacaggttaggggcactgttgggtgttgcaccgcttgtgccaaggggtatgtttggtgtgctatttggggctacaaggggcaggttgggagcactgtcgggtgctgcactgcccatggcaaggggtgggttgggtgcactatcaggggctacactgcccagggcggggcgggcggggggggcgtgctatcctgggcttcactgcccatggcggggggctggttggggacgctgtcataggttgcattggggtggtagggggcgggttcggtgtggtattgggggctgcattgccagcagtgtgggggggggggtggttgggggcactgtcaggagcttgcgctgtcaagctagtagcaggttaggtgtgctattgggggctgcactgcccgaggtaggggggcggattaggtgcgctattgggggctaaactgcccacagctggcggggtttgggggctctgttggggggttgcagtgtcagaggcgggttaggggcattatcagctgctgcactacccgtggcaggaatcaggttgggggcactatcgggtgctgcaatgcctgtggtggggacgggttgtgggcattatcgggtgctacactgctggcggtggagtggttgggggtgctatcggggtcacactgtcagcggcgggggacaggttaggggtgctatcggatgctacactgtggtggagggcagggggtggggtgttgagagcgctatttgaggactacattgctggcagcggggggcggattaggggcactctcagggctgcactgccggcagcaggcagcagaggtggcagtgacagcagtggtctccacggaaaggacagtccttccctccctggactccaggctttacaaagcgattttctcctgcttaagtacagaggacatacagtgtttccgcaggaatactgagcacggcagggccccccacatctgctgtggtttcctgggttacaccctctcgctctgtgttgtggatactgcctgggacccccaggcaccgagtaacgtgcaccacgtgggggacggtgctctctgggtggaggctcaggaatgagagcccgcacttgggtggggagagctggctgggtctgactttttgctgcttccgttcccctaggaccgcagctctggtgggcccagtggttcctgcggagtggggagccgggcactgtggtgtctccagtccccaccacaggctccgattcatggccagcttgggccgaaaggggagggtgggtgtcagtgccttcgctgaaactggcacctgccacccagtggccagcatgaccaaggtgaggctttaatgctaccactccctgcatctgttctaggtttttctggctttgcctgcccagcagtctgtgcccacctagaggagtaggaggggccaccatgccgcatgctggaggctggagcccgcagcctgcagatggcacagtactacagctcgccttgctgcggttggtggcagtgatggagactgcagctcgaccccagcgatggaggctggaggtaggagggtacctggtggtggccacgtggtaggagccttgtagggtggggctggtgcattgagagcaacagcagcagtggttgtattggcatgggcattagtggtggcagcagcagcaagtctgtgagccgggaagggggtagtaggagccctgcaaggcccagctggcctggggtgggtaagaagcagtgggtgctgcagcatgggcctcggtggcagcagtggaagtgcagccagggcaaggagtcctcccccacctttctgcagtctctggagggcgcccacctcctgctggctcctgagccaggcatgagtggcagcattgtctcattcttaacaaaatttagggaatgactatttgtgtatctttttgcttgttttttgttgtgttaatcttggacttttcgaatttcatgaatcagggagtggataaaaggtatcataataggccttctaactctatcacctgatttttttcctttcttccagtctgttttttcttatcaccatcatcttgttctttattttcttatgctgctgcctatatttctggtttctattcttgtttctctttctggtcctcctgctttttgttttctttatcccaagcaatggccttaacaaactgaaactgagttaaaagtaaactacttgctagtgtgttgtatttttaaaataattggtccattactgtgttttagagatgagaaagtagttgcataatgatttagttacttgaatagctttgctttcgtgatcctgttaatgcgttgtaagtagttatgcaaggaatgaaaaaatgaagcatcaaataaaatactgatagcaaacagtcatttcatctctctcccatatagtctggagataaatgcaagtcagggggttaataagttccaaaaatttatgagatcattaagtgaaccacattcccttcattttatttttctgccacagttttcaagagcgttgtcatttgcatgagcaaaccttgttcaccacatctttgcaacagggaagggaaggggaggatcatatgtacaatgttttaaggcaaaaaaactcacaaccaaaagcaaggctttattaactttcaccttcgagaagctgcagtgttgagccctgttttattcctagtattactgcctttgatacgaactcttaagtgatcactttagaagttaatgcattttattgactgctttcaagaaacagtctatattgtatcatgcatgtttttcaagcccgcagaattgtataaggcctatatatacatagggcctataattttgacactttttaatgatttataaggttacgatcatgtaaaatcctgttgacacgtgagaatatgcctaagtaccgctagatagcttattttgaagagatagttattttgaagagatagaaattggttgcagtttgttaggtgtatttgtcaatgcattgcctcaatgctttaaagcatatagaagtttgaatatgctttaatctcatgtagtcctttgtttatagggtgtttaatatttttaaagactaaagatgtcacagccccctttaaggttcagtaatattaagattggagatttatagggttagaatccaacaaattcagaggaaaattgttaaattatatagctgtagagcaggaaatgaaacccaggttctaagctctaaggggaccatgagctgccataccaagtgcatcagtgactgggcatagagttggcagaattacaggatggttaagagagtgagctgtagagcctcactctatgtgaacatgaattttatataagtatgtatgtatttatttattttgagatggagtctcactctgtcgcccaggctggagtgcagtggtgtgatcttggctcactgcaacctctgtctcccagattcaagcaattctcctacctcagcgtccccagtagctgggaatacaggtgcacaccaccatgtctggctaatttttgtgtttttagtagagttggggtttcaccatgttggccaggctgttctcgaattcctgacctcgtgatccacccacttcagcctcccaaagtgctgggattacaggcagccactatgcccggctgtgaacatgaatttttaaactgcatggtgctttgggtcccagcttctccatctgtacaatggggacagtactaaggttttctttttcttctcagttgactgaattatttccatagtctgtctgtcttgccactcttgttacccacacgaaaggacctaaggtaatttctgacagcctgggactccttgtgcaaaacagaaggtgccacagacctcattttaggagaaacctttgttttcctcttggaaccccaagaactgtaagcagacaggtccatctcaaaatccaaggctctgctctgttttgctttgctttacctgactttttttttgatttgggtgggcatcaaaaattagtaggggagagctaaagaaagttgtggatatgaacatgtatttatggtaaggtaagttatgaaggagagaaatcttaggatcttgtatggcaaattcttgcactaaagtagataatgactaattaggaaagcaggaaatataggacaagtcagaaagtcataagatgggagagaaaagcttacgcctggtagatcctctcctgtctagaagtgtcgtatgtgtgatgtttatatgaaggagctctaattaattggattaaaagataatgaaagctctaaaattgtcagaaaaatagaagctctaatgccttttatttcacgtgacttcagcaatctttgggaaatgagagttttaaaattattggtggtaaaaagtcttcaaaaagtagacatttggtctaaattaagtcagaggttaaattggctaagtgctttaatgtcataaactgcttctttgactttggaaaattgttcagtttacctaatttggaactgttagatttctaggtaaggcctggggagaggtggagttagccatgtctcctagctatgctggaagagttagactttatctgcagttctgtcatgtatcctggactctgcacctggtatgtaattgaaactgcttacattgaaaagaaaaattatgtgtttttggttttaaaaggggtgggaatatggttttttccaaaaagtgagttttggcaaatttagaaagtttaagaattatttttagttgtaggaaaataaagtttaagcaagttatagaaggtttatgaaaattaactttgtaaagaattgtgtgtgtgagcaagttgactaaagggacagtaatgttagatgtaataaatgcaggtacccttccactttatcttctgtttcttaggttataaatattcactacctacgtttctaaaaactctttcactataatattaacacataactccattctccttgtattgcctgctttttcatagtatcctgaaattgcattagtagatttagattcagaagatggtggggaagcatcttatgagtgttttaagtaaatttaaggcaaagggttttctgtacatgggtggttatcacagcatcacttgttgcagcaaaacactgggtaacaacaatgtttatcaatgagaaattgttcggataaatgatgatttgtgccttgcgaggctcaactattcaaaagcaccctcttttcctcacttgctttacctttggttctgggcctggagcctttcagaggttactcaggaaatggactcctgtttcctgtgactaatctggacagcggcttcctatttcattcttcagcatcttccaaaaatttctgaagataatttcttcctttgtgaccacccatactcttggtttactttgcagttaacaatttcatgccttcactagattatctgtgtgaaggtgtggggtgtatgtgttcatactctggagggagcagaggaaaatagccacagccaaaggagtaatcttgcactaaatactcattataagaatgttgatacgttcatagatggtaaatctgtcagtaatttttacttgtatgattcttggttaagactgcactcactggtgataagcgtgctgaagggatcataggtgctatacttatgtgtgggaattgcattcaaaccaccaatgcctgtctactcaagttttgttgccttttgattaaaaactcttgggaatgtttccctggcatgcaaatatgggaactgcagtttgattctaggtagaaactctttggtagttgaaatgccataataagagacacagctgtcaatgggcaacaattcactgttggtaaggaatttacagtgctacttgccatattcttctttatccagactttgtgccaagaaaatgaaattctttttaaaaatttttttctagagtaatcctacaatattgctgttatcaagcctgatgctgtaattagtagaaaatgtctagaaattaaaagaaaagtagtattttccaactatggttaaattaattgcaaaataacttcctcttaattgtcagattggagacaagcttattaagagtgaaataaaacataatgtgttgctggtgctaggtacctctaaagcctttgagcactttcttctttataaaggctcaatctactcatgtgtcctgtaaataatcctgctctaccagcatcctatgtaaattttaaaaattatagttcatatattagattgtaacaaatgttgttcttctttaattatatgcaatgcaatcttgttatagactcacattagcttgccttattccctgtatgtttgctgtaaaatgtatagtccttttcaatatatgatagcttaaagatggacttaatattttgttttagaaccaaaatcttttatcttatatacaggaaaattacattggaattcagagatcagcaaacatttcctgtaaaggatgaaatagtaactattttcaggtttgctcagcatgtggtctctgacaactaaactctgaagtcataccaaggcagcatcagtaatgtttaaatgagtgaatggcgctgtgttccaataaactttatttacagaaacaagtggtgggccacattttgactgcagggtatagtttgtggacccctgaacaatggctttttctgaaacaacacaattgaattgagatttgaaagaatgttgaggcagcattgtttgtctggggtaatacctgaggtttgtcatctcacaccagggaaatcagggatgtggacacacaagaagtgagttcaagagtggatgattaataggtgaaagaaagagaaaagagaacagctctctctcctgcagaaagagagaggggcacctgagtgggtcttccggttttgtggtgaaaagcacaaggttttataaaggagcttgaggaggtggtgtcttgatttacacagggctctagagactggttggaccaggtgtgaacgtttgcatagcacagggagaagctggccattgcaccctaatcttttattatgcagatgggttctttaccttaccaggaccatattgtctgttccttactgtacctgtggttgacagagaaaagggaagatggagccaccatgttgaacatgcctggcccacaggtagccttttcctattggcacagctgctggcattcctatgagagcttatcaatgtctgcagcccaattttacaagatgctctttgttagaaaataaatgatatgggttttttttttcattagtaggaaaactttacactaggacttccttactttcagtatctgcctaaataatttctttttaattcctacatcaatgttgcatgtgcaatagagaaggtgacatgtagggagctgtgtcagcaggggttgcatatttcttgatgagcatcccatgatgcattcttcttcacttgtggcaacattagcattaactaatctacagtaaagtagatgggtccacaggtcatgggacatacactagctctgccaattacatgttgatttaaataatatcattctctaaggacagctttttttcccccagatcctggtatgtatgtggagttggggagagacaccaaactgtaccccatttcctcatacattgcttatacttttagaagtgtttgaaagataatatcacatactagtagtttactgtttcttattcaagttagttttaatagtcgctagggtgaatgttttcaaaattgtatagatattcgggttgaggcaatactataaattatgagttcatctcagtttttttgtgctagcgtaatgacatttcggagacataatgcatatgtgcaaaatacttcacctctctggaaaacagtaaagggctacataataggacagacaaaaataaaggcttggcgtaatggctcacacctatgatcccagcactttgggaggacaaggcgggtggattgcttgagctcaacagttcaagaccagcatgggcaacatggcgaaacccatgtttacaaaaacgataaaaataagccgggcgtggtggcatgtgtttgcagtctgagatacttgggggactgaggcaggagaatcgcttgagcctgggaggtcaagggtatagtgagccgagatcgtgccactgcactccatccagcctggataacagagtgagaccctgtctcaaaataagtaaaaatttataaaacaaagaatgtttctaactgtaataaaggagaagtgatcaagcttaagtgtagcttagatttaatctttgatttccgggtactatattacttaaaaatatgatttggatatttagaagttgttcaaattagaaactcaggagtggggtcactggtcactaaggtgctgaatatttttaataccttagtggatatgtaatcaacaaagccaacggaaccaatagagcatttgctttcataagaatttaagtgttgctgggtactcttaaatcgagctcacattattggtgtcatttaatataattactgaatttctttgaacccagtttccactttttaaaaattatttagctcattaggctgaaaacttctctttgttacattttattacacttcagtgtaatatgtgtaagatgtacattgcttctctctagaaaggtgagacaagttgaagcagggttgggggtgggtgcttccagttcataggtaaataggagacaaacggttgcattcttttgagtttctgattatcctttcactgaatacacaatttacatgcaagatgccatagaggaatagtcacttatgcctgagtctggcttagtgaatctgcatttttacataaaaaactgggcagagaaagccaatcagatacacatttgtctcaggtgaggagagggatgactttgggttctgtcctttgtcccccacctgtaaagataatctatcaattgccaatttatattgccagggtcaaattcaacagaactgttttagtgtaaagatcttgaggcccacaagaaatttcctttctgacaaattatgagggaggtatatagctttcgaaatctttgtagttatttttttattttattatttgggttttttttttctttattgacaaataattgtatatactcacagggacatagtgatgtttcaatacagaaaagttatagtgagcagagcaggataatttcatatcctttgttaaaggaaaataaatctccgggacaccccactaagccaaataatagttatcttatttagaaataaaatgggaggcaggtttgtttgatggagttcctagctgaggtgggagaattgcttgaacctgggaggccgaggttgcagtgagccgagatcgcgccattgcactccagcctgggcaacaagagcgaaactctgtctcaaacaaacaaagactatagaaaagctatttgtgaaaatgctttttgatgtgctgttttatgtcacagaatgcaacctgtgttttgattcagcaagttcaaaacactctttttgtggaatctaagaattgattattttgatcctattgagctttcataagaaaatatgaatatccagttgtaaaaactagaaataagctataagctatctgtggaatgctttgtgaggtgctgttttatatcataaaattgaacttgtgttttgattgaacaagttgaaattactcattttgtagaatctaagaagtaacgttttggaacttcttgagcccttattaaaaaatagaaatattcagtcctaaaaactagaaacaagccatccgtgcaaatgcattgtgatgttctgttttgtatcataaagttgaacctgtgtgttgattaaacaggttctgaacacttttttttgtagaatttatgaagtggcatttctgagcctattgagcccttatacaaacatacagttttaaaagctagaaacaagctatctgtcaaaatgctttgggatgtgctattttatgtcacggaatgaaacctgtgttttaattcaataggttcaacacattcttttggtagaatctgagaagtgacattcccaaacctctgaggcctttaaaagaaaatacgaatattttcctctaaaaactagaaacaagcaatgcgtggaaacgctttctgatctgttagtgtcacagattggaaactttgttttgattgagcaagttcaacgcactctttgtaggatctaagtagtgacatttccaaacctattgagcccttataagaaaatatgaatatttagtcctaacatgctatctgtgaaaatgctttttttttttttttttggcacagagtcttgctgtgttgccaagctggagtgcagtggtgtgatctcggctcactgcaacttctgcctcctgggttcaagcaagtctcctacgttagcctccctagcagctgggactacaggcgtgcaccaccacgcccagctaatttttgtatttttagtagagatgtggtttcaccatgttggccaggatggtcttgatctgttgacctcgtgatccgcctgcctcagcctcccaaagtgctgggattacagacgtgagccaccatgcctgactgaaaatactttttgctatgctgtttcataacacagaattaaacctgtgtttttgtgagacaggttccaaacactctttttgtagaatctaaaaaagtgatgtatccaaaccttttgagccataataagaaaacatgaatatttagccctaactgctggaaacaagctatctgtcaacacactttgtgatgtgatgctttatatcacagaaatgaacttatgttttgatgaaacagattcaaaacactattgtagaatcttaagaagtgacatttctgagcctattgtgaccttataggaacatacaaacatccagtcctaaagtctacaaacaagctatcttggaaaacactttttgacgtgcagttttataacacagaattgaacctgcattttgataaaaacacgttcccaactctctttttgtagaatctaagaagtgacatttcgaatctattgagcatttacagtaacgtatgaatatcttgtaataaaaactagaaacaagctatctgtaaaaacactttgtgatgtgctattttatgtcacagaatggaacctgtgttttgtttcagcaagttctgaactctttgtagaatctaagaagtgacgtttttgaccttattgagcccttataagaaaatacaaatatccagctataaaaactagaaacaagctatcagcgaaaacactttttgctgtttcatatcacaaaattgaacctgtatactgattaaacagtttccaaacactttttttgtagactcttaagaagtgatgtttctaaggcagtgaggccttatgggaacatatacataatccagtcctaaaaactagaaacaagctatctgtgataaccatttgtgatatgctgttttatgtcagagaatggtacctgtgttttgattcaacaactgtgagacactctttttgtataatctaagaagtgatgtcaccaaacctattgagttttataaaaaatatgaataaccctaaaaacgagaaacaagctatctgtcgaaaatgctttgtgatgtatttttttatatcaaataatggaaccagagttttgatgaaacagcttccaaacactctttctgtagaatctaagaagtgacatttccaagtcaattgagttcttacaaaaaaaatgcaaaatccagtcccaaaaaactagaaacaagctacctgtaaaaatgctttgggacatgcagttttatgtcacagaacggttcctgtgttgattcaacaagttcaaaacactcttgatgtagaatctaagaagtgctgtttccaaacctattgaacttttattaaaaaagtaaaaatatccatccccaaaaactagaaacaagttatctctgaagatgctttgtgacgtgatgttttatgtcacaaaatggaaactacgttttgatttagcaagttctaaacactttttctagaatataaaaagtgacatttctgagcttattgagctcttagacgaacatacaagtatccactcctaaaaatgagaagaaaaacctatctctgaaaatgcaatgttatgtgctattttacatcacagaatgaattttcaaacactctttctgtagaatctaagaagtgaaatttccaaacctgttaagcccttataggaacatatggatattcagtcttaaaaactagaaacaagctatatgtgaaaatgcattgtgaagtgctgttttatgtcacagactggtccctgtgttttgattcaccaaagttgaaacactcttttggtagaatgtaagaagtgatgtttccaaacctattgagcttctataagaaaatatgaatatccagccctaaaaactagaaataagatatctgtgaaaacactttgtgatgtgctgttttatgtcacagaatggaacctgtgttttgagttgacaagttccaaacactctttttgtagaatctaacaaagtgacatttccaatcttactgagcccttataggaagatgtgaatatccagtcctaaaaatgagaaaaaaagctatgaaattgcattgtgacatgttgctttatgtcacaaaatggaatctttgtttttattcaacactttcaaaactttttgtagaatgtaagaagtgacattttcaaacctattgagcccttataagaaaatgcaaatatttagtcataaatattagaagctctctgtgaaaatgctttgtgatgtgctgttttatatcacagaattgaacctgcattttgatgaaacagcttccactcacttttttatacaatctaaaaggtgacatttcctagcctcttgagcccttattggagcatatggatatcctgtcttaagaactagaaacaagctagctgagaacatgctttatgacatgctgttttatgtaacagaatggaacctgtgtttttagtcaacaagttccagacactctttttgtagaatcttaggaagtgacattttctatttttattgagcccttataataaaatattaatatttagtcctaaatattaggaaaaaacctacctgtgaaaacgctttgtgatgtggtttcatatcacagaattgaacctgtgttttgacaaagcaactttcaaacactgtagaatctaagaagtgacattactgagcctattgagcttttataggaacatacaaatatccagttccaaaaactagaaacaagctcttggtgaaaacgctttgtgacatgctgttttatgtcataaaaatggaacctgccttttgatgaaacagcttccaaacaggtttttttttagaatctaatagttgacatttctggccctattgagcccttatagaaacatatgaatatccagttctaaaaactagaagcaagccatctgtgaaaatgctttgtgatgtgctgctttttgtcacggaataatacatatgttttgattcaacaagttcaagacactctgtagaatctaaaaagtgaagtttttgaacctattgagacttgattaaaaaatacgaatattcagccctaaaagctagaagcaagcaatctgtgaaaacactttgtggtatgctgttgtatgttatggaatggaacctgcattttgatgaaacagcttccaaaacacttttttgtagaatctaagaagtgacattttggagcctattgaacccttacaggaaaatacgaatatccaatcctaaaaactacaaacaagctatctggtaaaacgctttctgatatgctgttttatgtctcagaatggtactggggtttcaattcagcaagtttgaaactttctttttatggaatctaaaaagtgacatttgagaacctattgagccgttataaaaaattcaaatattagccataaaaattagaaacaagctagctgtgaaaacgctttgtggtgtgctgttttatgtcaaagaataatacctgtgttttgatttggcaagttcaaagcacttttttttctagaacctacgtagtgacatttacaaatctgttgatcttttataagaaaatatgaatatccagccacaaaaactaggaaaaatctgtgaaaatactttgttatttgcattttatgtcacagaatgaaacctgtgttttgatgaaacaacttccaaaccctctttttgtaaaatctaacagtgacacttatgagcctatggagcccttatagaagcactcaaatacccagttttaaaactggaaactgtctcaaaaacactttgtgaggtgcttttttatgtcacagaatgaaacgtgtgttttgagttgaacaacacacaagtttccaacactcttgaatctaagaagtgacattttcaaacttgagcccttatagaaacatacaaatatccagtcctaaaaacaagcaaaggctatctgtgaaaatgctttgtgatatgctgctttgtgtcatggaatggaatctgtgttttgattcaagtttgaaacactctgtagaatctaacaagtgatgttttgaacctattgagtcattataagaaaatgcaaatatttagccataaaaatgagaaacaagctttttgtgaaaatcctttgtgatgtgttttctatcacagaattgaacctttgttttgttgaaatagtttctaaacatacttattgcagaatctatgaagttatatttctgagcatttgagcccttataggtacacatgaatatcagattctaaaaactagaaaggagctatctttgaaaactatttgtgatgtgctgttttatgtcacaaaatgataaccatgttttgattcaaaaagtttgaaacactctgtagaatctaagaagtgacatttctgagcctattgagcccttagtaaaaaaacaaacaaaaaacgaatatccactcctaaaaaccagaaaaaagctatctggtaaaatgctttgtgttgtgctgtttcatgtgacagaatggtgcctgtgttttgattaaacaagtttgaaacactttttttttgtagaatataagtagtgatgttttagaatgaattgagcccttataagaaaatgcaaatatttaaccataaaaataagaaacaaacaacctgtgaaatcactttgtgatatcctttttttatgtcacagaatggtacctgtgttttgatttaacaaatttgaaacacactttttgtagaatctgagatgtgacatttacaaaccaatcttaagccagttagatactctgatgagccagctgtgtgtgtatgtgtgtatgtgtgtgtgatctttgattattaaaactgaaaaaataatcgtatattcatgactagtagacacagtgttttaaaactgattctgaaagatttgagggttaggcttgttttaaaaacaattgcataggtcctggaaacaccaagaattagtggcttctcattcctagtcacatgaaaaatattttactactcttgtgaatggccataaataatatgcagaattttttctgtgtcctaaccttttatataattggttctacagtgtacatcactgtgtgcaactttgttttgtgtgctcagacttacattttccagttttctccactttgatacaattggtctgtgtttcatacattttgtattttctatagcgttcctttatatgactctaccacattttattgagtctcctcatgctgacaggtaagtagatgaattaataaatgaatgaataaataaaaatgagagcaaatttcaaacaggtgattaatttagtgattgtaaccatggactcagcaggttagaaataaaaactgaaagatttagaatgcaagcaggcacatcataccttctaatagccattggaactatgacccacaaaccattagcctagaatgatgggacatatcttgtctctaaaaaaaggtcactgttcagttctcaaagaatggatataaaaatggcagataccattccacattattctacttcctttaacctctacgcataaaacttgagctgcagggaatgttacctcctgttcttaaaaagacttgtagttcagtgaggaactcactcctttcttcattcatgtgttcaaataatatagggaaatgaatggaaaagtgaagagaagttgaagactattatggggatagcacaggattagtcagcctcatggtattattgatctgccttattccacaaatatttaccaagcacctgctacatgcaatttgtatactaggtgctggggatacaggagataacaaagtccctgctgtcaatgaaaggggtcagtcctttgattcatctttagttaattttaagcacacaacaactatctcaaactttcttcacactttccaagctcccgatccttcatgcactcttggtagatgcctgaccttacctcttaccttactagaacctaagaccacctggtataaaatcccttaagcacactcagatttgcgtgattttacaatgatgtctgttcccaaagcatcctcacttctcttggagctgagggtgaagagctcctctttcttcccatccgtgatcttggaacatgtacgactacacttgtgacagtaaatgcttaatacaggcagaaggtttgttccttatttcctccctggggcctccctccagtgaatatctcttctagcattgtcagttgtatccaacagaaaagcagagatctctccattggtccaaaaacctaagatggactctcactgctaaacttctcaaatgaaaattcctccactttagtcctgattaccactcaaacactgttagactgggcaggtcactacccctgcctagttctgtttccccatctacataacagagaaataattgcgccttatctatcctacagaagtgtgaagaggtttgatgtgacagcagtgaaagcaatttaaaaagcacagagtgctatacataagaagacattttcataattattccgctctaacatgatatctgtattcatacgatctcaaagtacttacccaagcatggattctaactcttgtgtatgtaagcaaaggtgtaagtctgtcaccctccatgcaaatagaatctcccctcccttggcccctgcatctcaccatatacaggaattaactcaagatgaatcaaagttttaaatgcaagaccgcaaactatgaaaatcctttaagataacctaggccatacccttcttgacaaaggctttggcaaagcatgtgtatgtctaagtccctaaaagcaatagaaataaaaacaattattgacaagtgagacctaatacatgaaagagtggctgcacagtagaagatattaccaacagagtaaacagacagccttcacaatggaagcaaatgttcccaaactacatctgacaaaggtctaatatgtacgatctaccttaagtccttaaatcagatcaaaaagtccaattaatggttagagacatgaatacacactgctgaaaagatgtaacagccaccagtaaacatgaaaacatgctcaacctcgttaatagagaaatgcaaatcaaaagcacactggtcaaaatggtgattataacacagtccacaagaacagataccagcaggacagaggagggcactggggcaattgatcatgattcttatggatagtcatttagtgttattaatgaatttcataacaaaatgatcaccatacaaaaaatacaaaatgtgttttcttccctgagaaaggaaaataaaaacttggaatgccgattcactatgccaaaaggaaaagttaagctgaaagctgagtcatgcaagaaactgcctttctttttttttcctgagcagacagctactgataaatagttaaatttctccacaggtagctactctatgttcatctcatcttacttaaagtgctgatttactgagcaggagaaaaatatataactgactattcctttacctgtttgttttctcttgcaacatgtggattcagcaacgtgaccatactctccctcttttccccgcagcctgcttttctcttctaaacactgaaaccctaaaatatttttggagaaaggcacagacctctgtcgcccagccatgtctttaaccttggaagaagaaacttctaaattgataagagatctgtctcagacactttttcgtttacatcccgttatctcagaaagcaaaacaggctttgttccaacccaaagtaatttgtgaatattcaagcggtatcattctgatgtaaaatttacataaattcttgggtttaccaaaatgcaaatgggcaagcagatcactatttacagataatggcctaaaaaatggtaagagtaaatgctgtggagctaaatgtttctgagtctgccatttcctagttttgtagtttctctcgggcaagttacccaaagttgctgtatgttattatcttgacatttaaaatagaagtaataactttattataaataatagttaataccatagggtcattaggaaagtgtctggcatatatagtcacaacccagtgaatgccattattgtttttgctattatcagtataataattgatactaattttgatgctgaggtaaaataatatctggcagcttttaatttgctaatgttaaataactgaaaatagctttaaaaagtgaaaatatccaaatcaatgacaatatttgatttatataaaataagcttcattttttttagtttttttgctcctaattattacttcactcatcacactgatatctgagcactttttaaaacatatccacccttctcagttgtactacttattcccttttcttgtaatcccagccttcaaagatcctttctcatttttctaactcatttcacgactccctcaccttgacccccagttatatctctcttgaagtcaattccattgaattgactacttggcccaaacttcaccccaactcagtctctcttcaggaaggaaagtccccacacaaaaaggaatgtgtctttcaactcatgcgccctttttgaagaagctttccagacagcttccttacagtgatctccgttatccatcctttagatcgctgtggagtcctacaggggcgcaatgtggacagtcattcaaatgaagcacacctaagtgcttgcattttctaaaggcccattgattcatgtaactcccgtacttgcacagataagatgttcctgcctgaatgcagcagatggaaatgaaaattgtattctctgtcaaggctgattgtattacagcttaatgatttgcattttaaaacttggaagttctcataaatattaaagtgaaagaacaattggctacattattaggtaggttcggctgttcgtataacctggtgctaactatctaacctgcctgagtgagcctcagtcttcattactgcagcatttgtaagatatcaatgcctgcttgaactcatgtcttactaagattatggccaggattgagtaacatatggatataaaagcacttgacaaatcagagtatttcataaatgtaataataatatgctacatttataacatctatactcttttcctgtgtctatcttcatttaaaccttgcagtttctatcataatcaaagattttgtaatcaggttacaatgagtaggatttaacccataagcaattttcaaatttcctagatatgttttcagttttcacatttatgttggtgacaaaattctgttttcagttttggtgtttgcatcttctaaaacagtgtcttgggtacttgctctttgatgagacactgtgcagacataaagagtgtaagaaaacagaacagtttatctcagctttttgtggtctagataacctgcacactgctttcttggctcactgcaacctcctcttcctgggttcaagtgattctcctgccttggcctcccgagtagctgagactacaggcatgtgccaccacgcccagctaatttttgtatttttagtagagatggggtttcaccatgttggcccggatggtctcgatctcttgaccttgtgatccccctgccttggcctcccaaagtgctgggattacaggtgtgagccaccgtgcccggcctgcacactgctttttaataagctgatctgtcttcttgtttacataggctgtgctatagtcatttaaagttcaaaattactgctaaaaagtaattaatcctttactgaaatattcctgctatttcatgagctgtcttacaatttggaggaatctatttgtcactgatgtttaaaaaagaaagtcacagcagggaggctttagcttcattgaggaacattattataaaataaaatgatcgagggtaatttttttttgtccttgtggtactgtttctgcagatctacattaatctgagcatttaaagtaataataaatttgttatatcctctttattattcacttcaccatggtagcccctagtggtaaaaggagatgtaaattgctcagtgctcacattgcagggaattttttcctcagttgaataaaaaggagttaagcctctttggaaatgagggctatagcctgtcaataactacatatattcctgtttttaagaaatcagaattctggtgtccagtaaatgtagatgccagcattattaaaaagtgattgagcagagaaatgaattgaatttttgacccactctggcttccagctttcatgggagcctatacagggggatgatgaagagggatataagagaataaatgattgctctattaatctactttaattgatactaaaatctgacagcgaattacaagttccaggcagtaaggcttaccaattcattggtaatttcaaggttctactttgctttctttttgccttcagctccttgcaaaggacacctttttttttttttttttttttgagatggagtattgctcttgttgcccaaattggagtgtaatggcccttaacatccgcctcctgggttcaaatgattctcctgcctcagcctcctaagaagctgggattacaggcatacatcaccacgcctggctaattttgtatttttagtagagatggggtttctctatgttggtcaggctggtcttgaactcctgaccccaggtgatttgcctgcctcagcatcccccgcccaaagtgctgggattacaggtaggagccaccacacctggccaaggacagccttttatagttcagtttctcagtttatctttgactattcttaattaagcttgacctggttctccaccactgacgctattggagttgcaaagcattttgctgttataatgatagctcccttgatggctgttcattattaactggttttcaaaagtgctgcttttaactttcattttataaatatttaactcaatttttataaaatgtgcatagactatagaggttctgcttacctgtttaatacagtaaaaaaatcccttttgtaatcttatataatattaagaatgtgtccttaattcatgcttaacataaattcttacacaactagcagtatctcaaaaaataaatgatttaatagtttatgacccttatacatataattaattgtagtaaaatatcttagaaaatagaatgagtattttttataaagataaaaaatcctgatttttttttctggtcttaatataaaattaaatgtgttaaagggaacttataaattacatagtagttcattgctcaggaaaagaaatgacaaagtaattaagagtgtaaaattaaaaggattaatttttcttaaaggccgatgagttaacaacacgcatcaatctctcttccttctccaaacttcagacaaatgatggcaaagtaatttttaagaagtcaatttatagaggcaaaaaacctgaagtacagagagtaggaaagacagtaatagaattgagagcagttgacatccataacattcctattattacctccattttctggataagaatatggagaagaggaatcgttaagcaatttgctgattgtcacatattcagtaagtggcaaagttagtattgaaacccaagtagtcttgttttaaagtcatacactcaatcactgtgccataattcaataaattgtgaaggatgggaagcagatggagaagtgattgatgaagcaggactgagaaagtgctgcctatgtgcccacagtgtgaagaccctacaagacatcagaacatcatccagtgaagctgtgagcagctcaccacttggaaaaactgagtgttttggaaggcagggataaagtgcagttctgaaaagagaaaaatccatcaagttctaaacggtcgcgctctcttaccccacagtgggcaatggtctctccattcatcattttcttttccctgagtcccttgaatcttaaatatactattctgtgaattaaacatggtaaacattagactttgaccagcgctattatcagaagttcacatacctaatcaaaggacctgtaaccttcttcccctccttagtttctacaccaccagtagccaattatactatcccagctcccatcctaaaatccccttctaaaatagaaggcaaaagatcatcagtcatttgagcaaaatttcagcatgacagcatgagtagttgagacctatagtaacaactaaaatggactgggataaaacaaataatgtttggaatcaaagaacaggaaaaatacaaccgatattggagcaagaaaaaataaaaaagaatatgaaaaatagataagaaatagctattggaaaggtacaagaaatacaattttaaaaccagtggaacataagacaaaccacaaaatgagaaaattctattaataaaaggtcgggggtcggggaactgtattctttttttttttttttttttttttaagacagagtttcgttcttgttgcccaggctggagttgcaatggcgcaatctcggctcactgggcaacctccaccttctgggtttaagctattctcctgcctcagcctcccaaatagctgggattacaggcatgcgccaccacgcctggctaatttttgtatttttagtagagattgggtttcaccatgttgatcaggctggatggtcttgaacccctgacctcgggtgatcccaaagtgcagggattatgggtgtgagccaccgtgcccggccactgtatcttttaaaaatgtaattgtcatggaaggcaagaaaggtttaggaggctttccatattgaagaggactgaggagacatggcaactaattgcaatacatgattctagactgcatgcaatactggaggaaaatcatgctataaagaattgactcaattgataaaatcagaatactagcagtagattacatcaaagtatcgtatcaatgttacatttactgaatctgactaccatactatagttaagtaagagaatattcctatttttaggaaatacagaagtgtttagaggtaaagggtcatgatatatacaacttaacaaaagacttagacaaatatggggtatttaaataaaggagaatgacgtgcaatctgagaacaagaagtccaacagagaaaagcaaaaatagggagtcagcgagcaaccagtgagatgggagcagaaggatggaagggtggaggagtgacatctaaacatattaagaactcaaatatgttgattattttgtatatctgaagtttgaaattatcactgacaatcttctaaacttcaggaaaaatgaggatactgtgctacaaatgtaaacttaagaacaatatttacatagtcatcataatgtaattatgaaatactgatttcaccaaaaccaatttgatttaacacatcgagagaacagtgggaatagagtcctgtaattggtgcacctgtcctaattcctatgtaggtattataatagaaagttaataggtaatgtttaaaattgataaatcaagataacaatatcagcatgttaggttaaaaacaaggtaattaccaaaagcaccagataaaagagccaaacattgctttctctattgaacgggactacagcatagagaagtgttaagcaagctgccattattcttttgctcttattataagcctcttaatactatttgattactagctcatgagctcctatttataaaaataaaagcaaattttcgaagtcagaacaattcatgctgctacaaaatccctaaagtcatttcaacaatacagcacactgatgattatatagacatttttcttgtctgagttctttgtctagaaactttttaaaagaaacgtggtcctgtattacatgtagcatgctttggaagaaaaactatctccaatcaaaaagtttttaaaagagcccagatgttatcgtcctttgtatctctaaaagcaattgcttttataaaattaggatctactcttttttgaaatttgaatgctgaagttttgtgggtttcagcaaaagataggcataacatacatctctacattttattaaatatgatggtgcagatgttaaaaatatgtttgaaatgcagtaccttctgttcttgctttcaactcctaccctagagtaaatgaaatgctaatcacctcttgtgttagtgatagaatttgtgagtttccacagataaaatatgtttactgtaatttccaaatagttgatagccagtagcaatatcttgacttcagcaactggtatgtaagggtctatattaaagtgtttatattatgactagtataacagatggtattatttgttacagcaggtcataacactaaaaaataaaactattacacatctacaatttgatcacaaattttagtggcagtgatcacttattttatgaaagagaggcagtaattgccgaagtactgcctaaaaatgtaagacaattctcattacagggtaaggtaaaattattgacttattaaccagaaattcacatctatcccgctacaggaaaaaaagtgtacatttaatatctactacagtcagttgagttttcaaagtaatctgtcatctctaccatgaatatggggaacaggagaataactgctggatttttggcatttgacacctaatatatagaactttaaaggaggttatctattatataaataatctttgaagaagagcaatttatgtttttggacaaccaaaaaattacttgtttagcttcacaggaattttaaagcatgttttcacttattattaaacagtaacattgaatatactgctcttttatcagttctcatttttttcaacattcagtagatgactttaaagaactctcaccttcctggttttctttctaaactgagattatttcttctctcacttatgcacctattttctaatggccatgtctcaaaaaatttttattctagcgtcttttttccttttatcttggttttgctgtagtgctagatagatggttacttgtgagactttcaaatctatataccaggctccaacttctctccctctccctctctttttgagtaagggtttggctccatcacccaggctggaaggtcatggctgattgcagctttggactcctgggctcaagggatcctcccacctcagcttcctgattagctgggactccaggtgtacagcatcatgactagcaattccattgtttttagaaatggggtcttgctctgtcgaccaggctggtctagaactcccagcctcaagcaatcctcctgcctcagcctcctaacgtgctaagattacaggcgtgagccaccacacctggccaacttctaagtttcagtgctgtagttttaaattgtttctcatacttatctaatattttttcccaccatgtcaaacccttaaaaactcagtatggacaaaataaatattaacttttttgagattgataattgtatgatagtgcttattacctcaaaagaattactggggcagcagtataatccagtagatgggggaaatagtggatattaagaccgaaatgggatcataactttttagttgtatttgcccacattaattgttttaaagggggtaaaggcctggaatatgaaaacaggaggatataaaatatatggaggttgtgaaagatgactcagaacttgaaacaattgtttcactgcagtaaatacatgttgaatgcatagaacagagaaaaacagaagaaaagaagaaggaaaaacaaactccatgatttaaaatattgatgaatgtgacaataattgtatctttaaaataactgagaaatggtagaaataaaaattataagcttcaactgtatattacttattcttgacaaagatgatagttgcaagctgaagccaaaatttctaactaggactaatgcaaagatttcaagagaaactttaataaagaattattgatgcaagcgctttcagaaagcaaaggtagggactaaccattagctcttgtttagaaagataaaggtcacaaataaaatttgtgttttaatctatacattttcagcattatgtcatcataaatttgcatgttgtttattacaaatgggaaaaggtttcctgtaatatatcaagatgagttttaatagtttcaaggaccattgatttgtaaacttaagactattatagtgttgtggaaaattaaatataattggtgttttaggaaaagttgttcattgaagtttccattttatgtgccttaacagattaattttgcttattaattctgtgatatttaagcactgctgtaagcttcacagatttggcaatagccactatatacttaatgagtacaaactatggagtatttccatattaaggtagaagaaatatttaaaagcacttctacttgtgatgtcattgggggtgcaacacaatataaagtacgcacattgctggaggagaagcataaaataaagaactcacggggcagaaacttaagacacacctaaatcaaatctttgttttcagcattatctttcattactattctttgttacaaaaaaacattgctatctgtccttttctatatgttctctacattaaaacttattatttgtatacatactgttccctacatctgcagtgccattcccagctcacatatctgccctcttaaatttatatcaaattcaactcccttcaaaaagccttctcagttgctttaacccaagccagtagtctgtcttctagaaaacagttgatgccgatgcctccttttcctttagcaactgaaaataatattatagttatttaatgtgtgtgtgtgtgtgtgtgtgtgcataacatcatactatttagtagtatctatatctatcaagtatctgctacagtggatgatagatgacttaaagacagaaatatgttattcatatctacttctcacaggtctagtgctgttgcaggatattttttaaggaatcagagagactgatggggttcaggaggatatttattatttaggtgcaccagcccagtcggattaacatccaaaggactgagccctgaacaaagagttaagttaccttttaagcattttgtagggtgggaggagatctgtgcagggggaagcatgttagagaagtgagaaacaaagacagttattcaattaattgagaaatgcgttacatcatttcttacttttcaaggaaaaacatgttttgcgacttttgtttatgtgtctagtgactttgcagctgcccagctagggaatcagggtcttcacaatgcctgggaatggaggggagagaaagctcattagccacagaaaaataggccgttagttttttaaaggactctagctctttctctttctcagggggaattggattttcttacatacaactgaggttctgcttacacattctttaatttcttttaattcctgttccagtgcagtgcaatgttcatagtagatgcttaatattttttgaattattgtatctttagtcattgcgagccatcattttgagagtcagtctcattcttttagccctagattatttttattttcttgagatacgtgaataaagggcacaggaaaaaaacacagttgagagttttggataatagtaacctaattcacccagattttacttcatattggttggaactctaagttgggtgcaactaacatgagacttgttttgatttattgtaaacatattcttgaatgactaatgaacagtgcttcatgtgaacaaattttcaccttctgataatttccaatattacactttgaaaaacattcccattgtagtgctctagaaaatataatttcaattgttaaaattcaatattactgtaattgaggatattaaataacttgttgttacatgatgctagctgcagcttaaatttcagatcatgagtgttgttaatattatatagttggaattagttctgagatcaatgaatcaatgctgtcttactgttttgtctttaatttttataccacatttattttgtgagtggatttcataaaaggaagttgctttatgttgccaagctcattatcttgggtttttgtccagagctgaattccctttttcatcaaaggacagagagagcccattataaactattgagtaatgctgatttgatgggtaggccacttacctttaagtggaaaggaggccaggcgcggtggctcacgcctgtaatcccagcactttgggatgctgaggagggcggatcatgaggtcaggagatcgagaccagtctggccaacttggagaaaccctgtctctactaaaaatacaaaaattagccgggcgtggtggcgggtgcctgtagtcccagctactcgggaggccgaggcaggagaatggcgtgaacctgggaggcggagcttgcaatgagtcaagatcacaccgctgaactccagcctgggtgacagagcgagactccttctcaaaaaaaaattacacaaaaatgttagactaataaatattaataaacactaaaggaagaaatttagtggaacatttatcagaggcaacagaccaggaagttatagttaccctgtgaaaaggcatcatctaggattcatagaaaacatttgcaaattggcaacaaccaccaccacaacaaactaaaacaaatgaaagaaatagacatttatacagggaaaatataaatagataataagtgtaataaattttgtgactttccacttgaaaacaaagaaatggaaataaaacctatgtaaagaagtggtggagtgagccgagctggggtgggaggggtgggggcatcccaggcagagggaacagcagatgcaaaggtctggaggctggagcaggctgtgaggggtgagagcagcaagtacatgaagtctagaccacaaatcgatgcttcaccctcaaaaatagcctctcactggccaccactcaggcccagatacatgtgtaaggtgggcagccttcaggaaaagtgaccgcaaaagtgcaccacattgggaattctgaggtgtttgagaaagttatggatgaagggtgaggtagactctagtggggaatgtcctcttgccacttggacttctctgtctatttcatgggctattatcaacttctaaagagccagtggtttgggtgcacatttaggtgtaagtacctcttgcctcaagccttaactctctttccaatgagtcaagtgagctgttgtgtttaagtaacttctctttattgtgaaatctttcctatcactttaagaaccttcttcttcagacccaagtaatcccaaggcacctataatgtccctcctggagaagacaaaagggtgtcttctatttctgtgtggcccgatatttcagggcccctaaccaggttagttcaaggtgctcagcataaccatgaatctgctacccatgtttctcaggtgggtcataggccctggagggattgtggctgtggaccaagcagggggtgctgtgggctgttctgagaaggagggttttggagtgtccaagctgagaacatagaggccccagatgttgtatgagtaaattttcatctgacagaattatattttcctaactgaaaacatgaaacagagatgtaacaactgtgcctctttggctctgtctttgcatgctgtcatcagccactgaacaggagctgagagggaagacataaagaacagaaaacccatgagggggatggtccatgtgggtgtggaagtgagggtgagtggggatttggccaaagaggcctaatccacaggagtagagtctcatgtgtgactttcagaatgagcaggagtgagataggtggagggggagtgttggaacatctcatcagaggtgagaatccatagaaggagacactggtcattacagtcagtgagaaaagtgactttagcctgagcctaaggtcattggatcaaggaaggggccaggaggagctccttgaagggaagctgtgagcttgagaggcaggctgaggcagatcagtagaatgagcccccgagaagggctcacagagtcactgaaggactgtgaggtggcagggacaagctcacatggcctttggtcagtgagtctccagctgtaatgagaatgaaatggggaagatctgggacaggaagacaagctgggggcgctggtaccatcatggggagatgatggtgggtggctctaggttagttagagttggaatgaagagcagaaagcagcttcgtgatacctttatgtcataaaatacatttggcatggagaggacttggactttgtgcatgaaggatatggatgtttctaggctgactcccaaatgtttctaggctgactcccagaaactaggatgtttctaggctgttcctggctgagaatttggatggtaactatagtccaaagaaacaaagaacactgaaatcatatcttattttttttaactcacaaaatagaggcaggtagatatttatatgtgttttgttggctcaatgattttttttagtaataaacatatttacttagaaactactgggtgtctgtatgctctgggatttttttctcctgtcctgatgacatctctttcctttctctgggttcaggagttacttcccaggttgtggtgacacaggaacattcactttccacaactcctggaggggcagtcaccttcacctatggctccaaaattggggctgtcatcagagcatctcgacagctgggcccaacagaacatctggcaatgtccccagggcaatggtgggcacaagcagtcaggtcctgggacccctgcacaatcccctggttctcttcatgaagaaaaagccactctggttataatgaggactagaccaagaatgaggcccagtgttacatgctcggtgtggtgatctgaaatatcaccacagggacaaatacaaaaatacaagtgggaaactacactcaaacccttggatcaagcctcagtcctatgcttctgaagcaaatttcttgtttttggagtctggttttcaaccactgtagactcagatcatttattcttcaggcccccaatgggatcatcacaagcactttttctatcaatcatggcagtcacttgagatcaaaggtgaatttcttcttcctcaagttataagcaacactttggcatatttggtgaacttcaaagaaaatggctaagatagaggatgagagacataagaggcttcaggaatatttcagcagatgcaaagcagactacagggtaactcatttcccatatgatttgattgattgcaaaatgtgaaattaaatgcatacaaaggggaatgtgtgtcatttttcctcttaatgacaaagtaaaaaaaaagcaataaaacaaaaacaagcactatttcatgtgtcttgataaacttgtagaaagtcttataatatccacaatatctaggatacagtaaaataactttccatatgaagaaccagaagaacacaacttaaatgagaaaagacaattgatagacaccaatactgaaataatttaggtgctgatgttatgtaactgagattaattaaggagtaattatacaattccttcagtgagcaattttagacattattttttgaagttttaggttcaggggttcatgtgcaggtatgttacgtaggtaaacttgtgtcagaggggacattcttgaaacaagtggaaaagaagcaaatcccgaaaagaaaaataagtcatagaaacaaaccaaattaaaattagaaaacagaaaaatgcaataaattaaaaagaacagtctggagggactctggaacaggtaacagtgaaattaaagttcaggcattagaggaattatttaccgttaagtagggaagaaagtacaaacaatagccatctaagcccagcagagggagctgtggatcttctcagaggtgagcaaggccggaaatgaactcccggggctctcatttatggctcctgggtccatactcactggcccgaattggggtttagagcaggtgctttctcccaaagggcaaactcagagttcccagcagcccatcctccctgacagagcggctgctgcctggctgagcactcagaacttagggagccggtggttttggtagaggccccatgtttgcataatgtcctaaccaaacacacatctacccggggaggtgacgaggagttagaggaactgtcccagggtccagaagtagccgggggttctggggatccttggaaagtccacaccatagcttggatgtctatcctcccctctctccctcctcactgcccaggttcatgtagatttcaaagacaggactttggagggatctgtctgctgtgattcctcacacataacatgtatctgttttagtttcttggttcagttctcaggctgtggtgactcaggagccctcactgactgtgtcctaaagagagagacttattctcatgtgtggcttcagcaccacagcactgaattcagcagaagcctggtcaagtcctcaggacattgatgtgtaacacagataacaaacacccctggatgcccacttgattctctggctccctcctgggggaaagctgccctgacccctcaaggggcccagcctgaggatgaggctgagtatactgtgggctacaccacagtggtccttagcacagtgagagacccagatggggaagcaggacatgaacgagcttttggctgatccggggtacaaacatgaacgtaggatatcaggatcacgtggccagacacctgagctctcaaggacacctaaattttaactatccgtagagagaaaggtgggtggagaggtgtaaattgattcctgtatctgtttgaattttaaagtggaaaatatttgtgaatcatttgggagatgcagattcccaaaaagaagaatttatgtttatattccaaacagaacagtaatagtgagatcaactctaaagactaaggtcaaacacacttcatccagaaagatggatctcaaaagattttgttgttgttttgcctattaaaagctaagagaggaaattatattaataaagtttatttcatgttctatgttaatagtgtgtatttcatagctttttaagcattaaaaattataaaagtgttaagagggattctcttctctaatgttatataagaaagtatccacctaggaaaatattttgaaggtctaacccccagtacttctaaatgtgaccttatttttaaaatagtgttattgcttatgtaattcttaggatgaagccatcctagagcgaggtggcctcttgatccaatgtgcctggtgtccttataagatgatggtagtaaggagattggaagacacagagagaatgccgtgtgacgacgaaggcagagattgaatttacacagctgcaagataaggagcactaaagattgctggcaaaccaccagcagccagaaagagggaaggaaggatctcccctcaggtatatatggaaacattgccctttctatgaattttgggaggctagcctccagaactgtgagacaatacatttgtgttatcttaaccaaacttgtgtttaatacattctgacagcagttctaggaaaccaatacaccagacaataaattacacaatacttctgaaattgattgtacttctttcattttggcaaccagtttttccatgaatatgattatatctgtgctcatatttctaactttataaatatgcttgtaatttaaggttaagataagaaatccttgtgtcttaaaaatccctaaatatatgagaactgaataataatattaacattatgagatctaatggaaaattgtagcttttacataattccacttgttcactagtatcaagatgtgaaggtgggaagatcaccttgttattaacaaaacactcctggtcatctctgtggatttgagagtgcagggggagacacctacatattgtttgggaagtcacaaatgcagcatgcccagagcatcatgtacaacagtgtgagtttgctggacatgtgggcaggaagcagaacagactggggcatgaggaaccacctatcaccaaacccaccagcgccttcctccctggatcagcccagagctgctcagacttgaatgtgcacatggatcatgtgggatcctggataatgtggattctgatcagtgggtctggactgtggactgaaattctgcgtttctagaaggccccttcttccaaagatccacatacatgttttaatattaccatattcataagaatggtgggaaataagggaagccactttcagacagaaaccaaatagaaatttatctgagagggagctaaaggattatgatcaaagagaaatccccaattccaggcagggagctgatcacagagggcagatgggaagttgggagaggttctatttttttttttttaagaaatagaaatgaatgcaaacacaactcaaacctcctcttgatccaacatccctgctggctcctgcccaatttctgcactggcttcttctccagtcttttcccaagcatggaccctcctcaccctctctgcttccccatctcaaactcacaacttcccttctcagttctcctgtttctctccctttcattccacttccttcttctctgtgacctccttagacaatcaccaaaatatttctagaagaaaagccatgggtatttttcatcttttcttgaaagttgtcactcacattccctcttcgttcttcagcctctcttaccccttactacaaaagatgcctgaggccactgtttctcttttccatcccctcaaatagcttctccttccaacccgtttctctcctcagttactagagcattcagtgaagcactcagtcaggttaaaggatcctcccaaatgctcaccctgctctctatgtgtgatctcctgaagaatcaagtagggagagaaacatggcttcatgagtttgtggggaagtgggtgcatggctgaactgtccttgttctcagcaaatgtactttatttcatgcacagtttgtatatgagacaaccttctcctgcggactccttataaaatgggaagaattatgtgttgtgttttcacagaggaagcccaaatattccatgctcatgggtaggaagaatcaatatcatgaaaatggccatactgcccaaggtaatttatagattcaatgccatccccatcaagctaccaatgactttcttcacagaattggaaaaaactattttaaagttcatatggaaccaaaaaagagcccgcatcgccaagtcaatcctaagccaaaagaacaaagctggaggcatcacactacctgacttcaaactatactacaaggctacagtaaccaaaacagtatggtactggtaccaaaacagagatatagatcaatggaacagaacagagccctcagaaataacgccgcatatctacaactatctgatctttgacaaacctgagaaaaacaagcaatggggaaaggattccctatttaataaatggtgctgggaaaactggctagccatatgtagaaagctgaaactggatcccttccttacaccttatacaaaaatcaattcaagatggattaaagacttaaatgttagacctaaaaccataaaaaccctaagaagaaaacctaggcattaccattcaggacataggcatgggcaaggacttcacgtctaaaacaccaaaagcaatggcaacaaaagccaaaattgacaaatgggatctgattaaactaaagagcttctgcacagcaaaagaaactaccatcagagtgaacaggcaacctacaaaatgggagaaaattttcacaacctactcatctgacaaaggggctaatatccagaatctacaatgaactcaaacaaatttacaagaaaaaaacaaaaaaccccatcaaaaagtgggcgaaggacatgaacagacacttctcagaagaaggcatttatgcagccaaaaaacatacgaaaaaatgctcaccatcactggccatcagagaaatgcaaatcaaaaccacaatgagataccatctcacaccagttagaatggcaatcactaaaaagtcaggaaacaacaggtgctggagaggatgtggagaaataggaacacttttacactgttggtgggactgtaaactagttcaaccattgtggaagtcagtgtggcgattcttcagggagctagaactagaaataccatttgacccagccattccattactgggtatatacccaaaggactataaatcatgctgctataaagacacatgcacacgtatgtttattgtggcactattcacaatagcaaagacttggaaccaacccaaatgtccaacaatgatagactggattaagaaaacgtggcacatatacaccatggaatactatgcagccataaaaaaggatgagttcatgtcctttgtagggacatggatgaaattggaaattatcattctcagtaaactattgcaagaacaaaaaaccaaacaccgcatattctcactcataggtgggaattgaacaatgagaaaacatggacacaggaaggggaacatcacactctggggactgttgtgtggtggggggaggggggagggatagcattgggagatatacctaatgctagatgatgagttagcgggtgcagcacactagcatggcacatgtatacatatgtaactaacctgcacattgtgcacatgtaccctaaaacttaaagtataataataattaaaaaaaaaaaaagagagttaaaggctgagatgaggtaggaggctgccctgaggaagggtctcatcctctggcatctggtcacagacacgatgggcctgggcctgggctgcagagagcacaatggggctgctggtgggggctctgtgcggctctcagctgggaaataaagtccatgaactttgttttgcctcacggctcactggggccagcagctgggtcctctctgggtgcttggggagcttcaggccaagctcagcccaggctgactcctcctagtagtgtcacccagccacagaggctgtacacaggcccagggagagttaggttaagcaggggaagaggagcacatttgcatgaagggcccctccctctcctttgaggctagagggtggataagagagacctgcagcgtggctgcctcagcagagctctggggagtctgcaccatggcctggaccccactcctcctcctcttccctctcctcctccactgcacaggtcaggaggaccctcagcatcctcatgccccagctcactgacaccatctcccaaactcataccagaaatgttgtttgctcttgtccttccttcaggccataatgagcgtctctgttttcagggtctctctcccagcctgtgctgactcaatcatcctctgcctctgcttccctgggatcctcggtcaagctcacctgcactctgagcagtgggcacagtagctacatcatcgcatggcatcagcagcagccagggaaggcccctcggtacttgatgaagcttgaaggtagtggaagctacaacaaggggagcggagttcctgatcgcttctcaggctccagctctggggctgaccgctacctcaccatctccaacctccagtttgaggatgaggctgattattactgtgagacctgggacagtaacactcacacagtgatacaggcagatgaggaagtgggacaaaatcctcaacctgctgaggctattgttcagtgacaatttttaattttaaaacattttctgtatgtaaaaaatctatctggatgcatcctctgatttagaacaattttactcacaatttcccatttaatgtttcagaagtctcagaagaaattaaaacataaacaagaacataagcctcctgatgacactgagatgtctgcttatccttatgggctgataccaaagtctgtgaagctcaccttttctcttgaaagaaaaaaagaatgagccttcccttgagcaaatcttgctcagagcccaaacttcaagcccacaaatggacagtcccctgcagcatgggctcttgttcttcaaggggtcaatgaggagacctccctttcccaccccaggtgtctgtagtcagggctgcctgatgttccctgcatcctgggactaggcactcaggtgtgtaataccccagaggacaggcctgggagtaattccaaacacagagctggcctgattcactttcaggttcctttattttaagttaaaatgtcaggatagaaagaagttgggtatggggttattcatgaaactgaggccagaagatgtctttgtgggctgtgagagggtgacatggtggctccaccattgctaggggaatgttgagtgagctcctaagaagtttggggaaatcggtcttgtgagtgtggcttcccttcagctcattccactcagaaacatgaggacacccatgggtggatttttctgaactcacaaacactgacttgtgtcctcttttttcttatcccattggagatattcagtaatctactctgtgagatggggtctacaggagatcatggagaagaaactcttcaacctgtgcaagtgaaacttccttgtgtgaagctcttgatgtgtccagattccaaggtcaccttctcctgcacaggggtcagcagaaacattgaatattaccatggaaactggcccaatggctccagagaaatcctgaatttgtgactgagaactgcagtaatcaaccttcagggatctcagcctgattctcctttttcaacttgactttccttgactgtgcagcccgagggtcaggatgactatcactgtcagagctgaatacaacccgatgctgccatgagctcccattccatggggaagtgacataaacatctgtcctccatttcccccatcaaatccgtcactgccctgtccctgcctgtgaccgacacctgctcaggttgtggattctgctgtcacttgtgattccagcaagtctgatgcttttaacttggtgcatcattattagggaagccactccctctaaatcctcagaagatgcccccaaggagttcccggatcccaaggtgcaggatcaacctcccagtaaggaaggctctctgggccccatcactgttcatctgttctactttaatcctaagaaccttgagccttcattatttcccctttctgcttatttggctggaacgttgctggaatgcatctcagttctttggggactagagggataaaaagcacagcccatagaaagctttcacctggttaagtagcatttcctaagagccacgagggcatctgctcactgctcactgctcatccttgcatcataatgggttcctggaccctgggctctcctggctcattgagtttaccaatccctccacactccactcattgctagggctggctagagggaaggatagtaattgtccaatagggagatagttttaggggggattacagaaactactccccataatctttgttgataacatcttcatcttgatgtttgctccccaggatctgattgtgacagtggaagtctgacacttgaagaaatgtaggtttacccttctgaaaggcctggccctggcttggcctagggctggaaggaagaggtgctgagctttgggcaaccaaggcacagctgtcaaggggctgagctctctgcaatgtgggcctcctgcagagacatccctagggaggctgagacctgacgatgatgcagaaaagcaaattgaagtgagcaggggatggtctgtgggggaatcagatgacaggtggggggccagatgtgatacagatggtgcaacatgaagaaaagtgtcttttgtgattgttctgaggagaagggctcagtgctagagcagtgataatgaggcaggagctgggtcctgaagccacaggggaaccaggtcttgggtctttttctgagggtccctagggaagatcacatgacaaccaagtcccatgttatatgtccagtgctcggtatcccagatgctgtccctcccagagcctctgggtgtcctcgtcccactcttccctgtgatctgttttcagctccaggagcaggttcatactctgtgccaagagtggggcttgcatggctgagtggagaacagatttgcaagaagatcccaccttgcagtctggctctgtgtcctgggtgtgggtggtaactgaggagatgtaggcatttgggctccactagagaccacagggagcagagctcacaggggctccccacaacccgggctcctcccttcatcctcctcccattgccttcctcactggggttcgggccaggggagaacccagggctgcttcaagggccctgctctgcaaccatggtctttatccaagtcattgtctccaaactctgtaagggctttctctgaaactgtaggagcattttttttccatatgcccaaggcaggcttacagggtgctgaccccaccccttaaaagtgctaatagtctctcaatgctcaagacaggagggagaattaggaatcaggagcctacccagagcttccctctttcctcactttcaaaattgcactgtgtctagacatagaatttatgcctgggttgggaaatatttatttacttattaatgtattcattcattaatctcactttctgcaatctgtgtaagtgaggggcagaagggaagaggggcacagagggagaggttgaacccaagggcaggtcctggcagtctgggcacaggctctgatcagccagggggaaggaagagggagcagctcctggtgccctggagggaggggatgccctgtccctgctgggcctcccacttcgttgtacccagggaatgcttttcagagaggcagagctcttagcagagtcccgtaaaccatacagtgagttgggcaggtgagtccaggggtaggggctgtgtggagacctgagaccaggtgtggcctggcatggacactgcccagctccattcttttagggaggacaaagtggacagaggaagagacaggagacatgggtgtgtctgagctttgggcagcaggggatgctgtggcctagccctgagggctgtgctgtggatcccagctgggagccaccccctggtcctggcctggagccctctgtcccctgctcactgggactagcagctgtgtcctcacaggtccctgagtacccacagaatagccacacccaggtccacactctcccggggttagctttccaggcagaggtcaagagtcagaacccaaggtggggtttagacagcccaggagaggaggctggtttgcaagtccctcctaacccccttcgccctgaactgctggaaggataggagagacttgaagaatccaggcccacctgagggtcctcaggacacagctgtgtggcgggtccccaccatggcctgggctcgtggcctctttccttttctccttcactgctcagctggctggggccaggcgtcagggctgaggatgaagggaccaggattgctgtgtgtgtccctgtccactaacctgtgtctcttactctttgtctgtcatgatattcagggtcctgggcctgttctgtgctgactcagccaactgcagtgtccaggtctgtgggacagatgaccccagcacctgcactgggagcagcaccaatgatgggagtatgcacgtgttttggtaccagcagtctccaggctgtggtgcctcagaaaccctcctagtcaacaacaccctgcccagcaggagcgggccatgctctgattgcccatctggggtagtgtcagtggggctcagtgagcagctgagctttcaccccaatatcctcaaccaggcgagcatggcagggctagtttgagctggtttatcctcccatccacctatgcctgattttggcagggcccagtcaggaactgaatttcagcccccatccccagcaatgagttgaatgaaatggtacaaggcagagcacaccagccctcagtattccctccctgaacccagactctggtggttatgggggccagggaggaccagagctttgtctcccacctggcaatgagaatactggttggggatggaagtcagtgtcgttggcacacctgctgtccccctccctgccctggtgtcagtgagtcctctttttctcatgaaagtgtcagcagcactggagtactgagagccagcgttctgcctttgctttggcagtgggaagctgaacctacaaacctgtgtccttcaacaactcaacaagaagatcacctgataaaagggagattagtggtgcctagaggctcaaaatacagtatttaaggtgtctagcattcagttcatgaaatcattgtcacatcaagaattaggacattcagaacccaaatgaaagaagacagtgacacgcatggacactgaagcaaactcagatgctaaaatcatatgacggatttttaaagcaacaaccacaaaatcccttcaatgaataattaaaaacactcttgaaacaaatggaaaagaagaaaatctcagaaaagagaagttataaaatcaaaccaactggaaattaaagaacctaataaactagagcacatttaaaaagaaagttaaggcaggactcaagaactggttacatttgagattcagtcactgggtgaggtgttccacacgacataaaaatacagtaaaaataagtaggtaaacacatgaaaatcaatgattctggtttgacttgggaaacattaaagtggaaaatataaagaataaaatagcatttatttattgaaagaaagaactacctttagctttttatcgtttccccattaatactctcttgaagatgttcccaggggacactgtgagtcttctcagaggtgagaaaagcctgaaataaactcccacgaatctcatttaatgggtcctggggcccatgctcactggtctgagttagaggtgatagcaggtgcttcctctcaagtggtgaaattagacctcacagcagcccagcccccctgacagtagagctgctctctcagctgaaaacaacagaagcagatggtgttggtgatggttttggtaaagtgcttattaatgtgtgaaccaaatatatgcccttcatctagggagctgcataggagataaaagaaccatctcagggtccagcagcatcttagagctctgcagatttttggaaagtttacatcatgccctggatgcttctcctccacttccccatcctgttcagtctttgcccaggttcatggagatttcaaagaccagcccatggagagagccctctgttcttccccattcctgtcgtgtctgtttcggtttcagtatccagttcttagggtgtggtgactgaggagccctcactgactctttcctgaggagggacagtcactctcacctgtggctccagcaccagagtggtcaccaacaatttctatccacactggatgcaacagaagtctggccaactttttgagacattgatttatgatgcaagcaacaaacattcctgaatgaccacctgattctcagaccttcctgggagcaaagctgccctgagcctctgggggacccaatccataggctagactgagtactactcaagctacacgacagtgggggttactgcagtgaaagatccagatggggagccaagacgtaaccctgcctctgacagcctggggagaaaatgatcacgtgatatcaggatcacatgaccagaaacctgagctctcaaggcggtctaaatgttgcctatccttaaagaaaaaggtaaacagaagggtctacatcaatatttattcctgtttgtgtccaaaagttgaggaaatccatcaatgaggaggaactgttccagaaaagcggattcctaatattttgtaatccaaaaggaatagtattgcctacatcagatccaaggaataaatttaaatatatttttttgcaggaggaataatcttcaacgatgtactttgccagctaagaacgaaaggaagaaacgttctttggtatattaataacattttttattaggttgtaattaaggtgtattgcacaatttaaaacatattaaaatgattttttgtaagaaattcttttttctatatgttatgtgttgtattggactctaaagaatatatgttaaagccctacaccccagtattcaagcacataaaatcatttgaaaatcggatcattgaagatataatagttaagatgaggtcattctggagtagggaggtctctttatcagtgttcctgggtccttgtaggaagtcaaccatgagaagacagagaggcacagggagaaagtcatgttaatatggaggcatggagtgaagttactcagctacaatacaaggaacaccaaagattactagcaaagaggaagagctgccaggaagaatcccaggaaggttttctctacaggtgtcagagggaacatggccccgccctatggatttggatttctagcttccagaactgtgaaacaataaatgcctttcattttaaatcacatgtgtagggttatttttatggcagctcaaggaaattattacaccaaacagtcattgtaactatttctgagtttgcatgcattctctcatcttgtttctcagttttttcaacaaatgtgaccatgtctgtcttcgtatttcttccttgtataactggcattgaaggttgacgtaagttattctcgctgtcacaaaaattatataaacatgtaaataaggcttaattttattttgttcgtaggtacaaatgcaaaactaattccaattgttttgtaagaaatttttgtaaatatttttctcatgtaaattagaagggtctcttgagttactgaaacacttctggccatttctgtgatcttgtggtgtcaggatgagatggctaccatgttcaatgaaagcttcaaatacattattattttttctaggtttttaaaatttaatacagtctaattaaatagtaacagcagtaactaaatgcactgaaaaacagacaggtgcctgcctatatctggaataaaattacatcaaactagtctccatggtaaaaaaaaaaaaaaaaaaagacaactgctgatatccatggttagacaagtcaaggacaacttggaatttctaaagccatttttctaaaaatcaacagcaacagggacacaactacttcaaggggtaaaatatctatatctacattgttttttattaacgaagattgagttgcacctaaacagcatggcattcttatctttagccttaaaggaaaagtgaaagtattttccatttgcaccagtttgaaatatttctgaaataaggattacttcaaatgaattattacattacttatacacataagagggtctcacatatagtgaaaaggcaaacccaggattttaacgtcaaccttttaaagttgatttgattgcataaaatgagagagaaattctcacacgcataatctgtttaacaaaactcctcggtgaatcaggatgcaaaatataaaatgttctaagggagactctgatgagcaggcatataaaattgaagtgaaacccatgtcagcttcgttcctcccacttctttggtgcttctatgaggagctctttctctactgcaagagcctggacttttgacctaatggagaagaacctcaggaaggcaaggcattctgataaaatgccccttgagaccttttattttttaatttaaagggatcaactggtcttgttcagccttaggaaagaaagcatcactcagataaaagtatttggggaaactttaaatacctggctacctcttgatatatttaaattagattgacttcagctgttcttagaaagcattctgcatagttatccagagcagccactgaagttctggttctccttacatggctgcattcagaggtactccacatgaggcatgtttagaaaaagaaggacccttatacttgggagtttttgttcttccacgtaacctgttagtactgttggtaaaggcagtccccagatggcaccagtgcattttgtcaatggtgagtctagacagtgttgcaggggtgttgctgatgagtagaacagtgagcagataaaggtgagcagtgttgatctaaaggctttggggtccatctgcttatccttgcacacctgaacaaagtcatcagatgtgccacaccatcaaactgttgaagcttggacttgatacatgatagagttccatgccaattgcccatcttcatattcaacttgcagattagttggtccagctgatattttaacagatactgttagtagatcatctgaatgtgaactatctctaaccaagaaatttccttctggtgtctcttttaacttttctttggcttcattaacaatcatccttccccagtgccatcctgtttgagctcctacggggacttcaccagatgcaccacctccagggaaggttcctgtgctgaccctgctcctcactggctctgcatctattccctgccattcccagagggctggagacaccacagggtcatggaagtaaggtcactgaggcaaagacagatggccacccaaactgggtgagaaaggagctttcatttttcctggaagtcagtgggaacccccccaatcaaccctatgggtttctgaaatggtggaagatggggaaggaatgaaaagctgcctgtttttctcaacaggtccaggttgagggatgacaaagttccttgcagatgcatcacccacagatcaccagcaggaggatcctgaggctgcggtcagtgccctggcacaggacacatgggccatgtcccatgcagcaccggtggctccgagtgagagggcttatgctgcaggggaagccaaagattcctgagccacagcggtaagacatgagatgacttaaatatctgtccctcaagtatattattcttaatatttaatgcacaaaatagtgaaagaagagattagcttgcagtgcaaattgaacagattcagtatagcttgaggcatgagaaacaacagctctattaccatttaccaaaaatacaccctgaatggacagggggtgcccgtgagctggagatagggtgccccaattgaggaaatataaatactggttatcagttaaatttgaattcatgtaaacaaccatttaatagatttttatttttagtataattatgtcctatgcaaagttacttatctttaattctaatgtaactggatgtcttgcatcttgtgagataccattcccagcattcccagctgggctctgacatctgagtctatgctatttacctcaaaaacagagttcctgtaacaaagttatccccaagtaagtacttcggttagaaataaatatgtctgggctgggcacagtggctcatgcctgtaatcccagcactttggtaggccaaggcaggcagattacttgaggtcaggagttcaaaaccagcctggccaacatgatgaaaccctgtctctaccaaaaatacaaaaggtagccgggcgtgggggcacctctgcagtcccagctactggagaggctggggtgggagattcacttgaaccgggaggtggagcttgcagtgagccaagattgcaccactgcacttcagcctgggtgacagggcaagtctctgtctcaataaataaataaataaataaatacataaataatttataaataagtgtgtcatcccatccacctcaaggctgtaaaacctagcatgccttatccctcctcactttcttttttttttttttaattatactttaagttctagggtacatatgcacaacatgcaggtttgttacatatgtatacatgtgccatgttggtgtgctgcacccattaactcatcatttatattaggtgtatctcctaatgctatccctcccccctacccccatcccatgacaggccccagtgtgtgatgttccccttcctgtttccaagtgttctcattgttcaattcccacctatgagtgagaatatgcggtgtttggttttttgtccttgcgatagtttgctcagaatgatggtttccagcttcatccatgtccctgcaaaggacatgaactcatccttttttatggctgcatagtattccgtggtatatatgtgccacattttcttaatccagtctatcattgatggacatttgggttggttccaagtctttgctattgtgaatagtgccgcaataaacacaggtgtgcatgtgtctttatagcagcatgatttataatcctttgggtatatatccaataatgggatggctgggtcaaatggtatttctagttctagatccctgaggaatagccacattgtcttccacaatgcttgaactagtctacagtcccaccaacagtgtaaaactgttcccgtttctccacatcctctccagcacctgttgtttcctgactttttaatgattgccattctaactggtgtgagatggtatctcattgtggttttgatttgcatttctctgacagccagtgatgatgagcattttttcacgtgtctgttggctgcacaaatgtcttcttttgagaagtgtctgttcatatccttcacccactttttgatggggttgtttttttcttgtaaatttgtttgagttctttgtagcttctggatattagccctttgtcagatgagtagattgcaaaaattttctcccattctgtaagttaactgttgtacttagttgtactgggtttgatcgtagtttcttttgctgtgcagaagctctttagtttaattagatcccatttgtcaattttggcttttgttgccattgcttttggtgttttagacatgaagtccttgcccatacctatgtcctgaatggtattgcctaggttttcttctagagtttttatggttttaggtctaacatttaagtctttaatccatcttgaattgatttttgtataaggtgtaaggaagggatccagtttcagctttgtacatatggctagccagttttcccagcaccatttattaaatagggaatcctttccccatttcttgtttttgtcaggtttatcaaagatcagatggttgtagatgtgcggtggtatttctgagggctctgttctgttccattggtctatatctctgttttggtattagtactatgctgttttggttactgtagccttgtagtgtagtttgaagtcaggtagcatgatgcctccagctttgttcttttggcttaggattgtcttggcaatgcgggctcttttttggttccatctgaactttaaagtagttttttccaattctgtgaagaaagccattggtagcttgattgggatggcattgaatctataaattaccttggggagtatggccattttcacgatattggttcttcctatccatgagcatggaatgttcttccatttgtttgtgtcctcttttattttgttgagcagtggcttgtagttctccttgaagaggtccttcacatcccttgtaagttggattcctaggtattttattctctttgaagcaattgtgaatgggagttcactcatgatttggctctctgtttgtctgttattggtgtatgagaatgcttgtgatttttgcacattgattttgtatcctgagactttgctgaagttgcttatcaccttgagattttaggctgagaggatggggttttttattttattttattttattttattttattattattatactttaagttttagggtacatgtgcacaatgtgcaggttagttacatatgtatacatgtgacatgctggtgtgctgcacccattaactcgtcatttagcattaggtatatctcctaatgctatccctcccccctccccccaccccacaacagtccccagagtgtgatgttccccttcctgtgtccatgtgttctcattgttcaattcccacctatgagtgagaacatgcggtgtttggttttttgtccttgcgatattttactgagaatgatgatttccaatttcatccgtgtccctacaaaggacgtgaactcatcattttttatggctgcatagtattccatggtgtatatgtgccacgttttcttaatgcagtctatcattgttggacatttgggttggtttcaagtctttgatattgtgaatagtgccacaataaacataggtgtgcatgtgtctttatagaagcatgatttatagtcctttgggtatatacccagtaatgggatggctgggtcaaatggtatttctagttctagatccctgaggaatcaccacactgacttccacaatggttgaactagtttacagtcgagacgatggggttttctagatatacaatcatgtcatctgcaaagagggacaatttgacttcctcttttcctaattgaatactctttatttctttctcctgcctgattgccctggccagaacttcgaacactttgttgagtaggagtggtgagagagggcatccctgtcttgtgccagttttgaaagggaatgcttccagtttttgcccattcagtatgatattggctgtgggtttgtcataaatagctcttattattttgagatacatcccatcaatacctaatttattgagagtttttagcatgaagggctgttgaattttgtcaaaggccttttctgcgtctattgagataaccatgtggtttttgtttttagttctgtttatatgctggattatgtttattgatttgcgtatgttgaaccagtcttgcatcccagagatgaagcccacttgatcatggtggataagtttttgatgccctcctcactttcaaacagtacaacagttaacatttcctaaccattggagatattaaagcacagatcttttatatgagattagttaaaatttttatctttaatgcacaagagtttgggaacattaggaatttgtacatatgctaaattatatgtaaatgaaatgatacgatgtttggaatatgttttaaaattagttgagtgtgtggagtgaggggtaaagagggatgtaagatgaataagacaattttatgttgatgatgatttagttgggatgctgggtccaggacatgcaatgggcttttctccatagatgtctgcaacttcaaaaacatccacagtgacaaatgtgtaaaaaaaattctgtgaactcttctgtggtggtgtgtgtattgaggtggataagggaccccctattaagggcctgacttctccccctgaagcacggaaataaaggagaatcttgagtttcttcaagggaaatttcaggtacctcactgtccctgagaagaaaacctgactagcaaaaaggttaaaggagcttaaaacaaccaaggaagttagaggcatgggatgtctgggtccctatagaaactaaaaacaacaacttaacatatgcccctgagttgtttttcaaacactcagaccacctccaaaagtctcggctgtcagtaggcctcagataatgggaaactgaggactgaggtctgactgcccttctttgttctaagtctcttactgaggggccctgaggaaatcacgcccatgagccagagctaacatttctttctgttgaccccaattttttggacaaagctttacgaccttaaccagttgcaaatcaggaaatttctaaatctacttacctttgatctgaaagcccctgcttcaaaatactctactgttttaggccaaatcagtgtataacctctatatattgatttacagttttgactatgacttctgttttctgaagatttcccctgcttttaaacacctttgctttcaggccatcagggagtttgggtcttaagcatgagctgcccgattctccttgcttgatgcctgtgataaatgtctcattctcttgctgcaatcctgatgtcagtgcttagatttgtatacctggtcaatggattcaagtttggtccattaatagtgtgtcttgcttttaacagacactcagagttgccagatggtgtgcctccaccctgacctccagttgaagctcatctcctccccgcacacagaggaggacttggtgagaaggccacagaatggaaaggagctcagggtttcccaggaaagagaagtgagtgatactggaggccccagagcaagaggaagggctgtgaggtaggcaggggccataaagtgaagggcatgctggtggggctgcaaggtccagggtttatgtaaacagcaatgaagaaccacaaaaggagtttaagcccaggagtaagatgaacaggctgaatgagaaggatgtctccagctgcctcgaggagaaaggcctgagggcaccaggggatcctggtcatagattattcactaagagaacctgtgagtctagaagtttgaagactatttgcacagttaaagcagatttgcatctgggatacagtgaagaagtgataatttctgcattaatctgtccagtcattcaacgtttctgcagaaacattaaaaggtcacacttatctttcttagtaagccatgaaaaaaatgtaagtagggaaaattaggtttagaatataaacaaattgtattctatctaaaacaaaattctattgagaagtagatgaaacagataagcagaaaaataaaaaggtaggaagacaaaactcacttcataaaataagaaatgtgttacaccatgaactggtaaatgttatgcctacccaactattattttttcacaaataaaatctagtgagtatcaacatgctaaaatcatggtgtgacttaggaaatgttttctgggccaggtgcggtggctcacgcctgtaatcccagcactttgggaggctgagatgcgcggatcacgaggtcaggagatcgagaccatcctggctaacatgatgaaaccccgtctctactaaaaatacaaaaaaaaaaaaaaaaaaattagccaggcgtggtggcaggtgcctgtagtcccagctactcaggaggctgaggcaggagaatggcatgaacctgggaggcggagcttgcagtgagctgagatcgcaccattgcactctagcttgggcgactgagtgagactccgtctcaaaaaaaaaaaaaaaggaaatgttttctgaattgctggatgttaaatctatcactgaggtgattcctgaaacagtccccttctatgtcattgccttgaacaaccccttcatgccactcaagtcagcacaactgtttcagcatctgtggtggtgccatagtgacgtatgcaggtcacttagctttttctagaatgtactcttggggcactggcaccttaaaaggttataaaatttttaaacagttataaacgaacatatttgctcctctcatagatcaagactacttataggagtgagatactggctaggcatctagtagaccacgtcatcatcacaggatataggattcaggacacagatgtgtatacagaggaatagtgtcctggtgagctgcagagatcagctgggctctctggtctctgagccatggggaggtgagtgtcctgctatcagcaggctgcactgtgggacttgcctgtggtgtctgcacagctgctctttaagaaccattcattccaaggagcctaggtctaggggctgggccttgtgctcattgatggggactcggcagctgtcttctctggtctggcagagtctgctgaacagggacctgtgtatggtctcagcaggtgatatctcctagggcccttccaaggagggaaagcaaatcatcttcctcagtctgcagtgtgagctgggctccagccccagggctcaggaagggactgggcagtccctgcatagaaacacatttgcatgagcagcccctcctctgctgggggttgggaagaaaaggaggcctggggcagctcaggctcactgtggtggtcaggggctgtgtccaccatggccagaacttctctcctcctcctgatcctctttcactgctggcctgaacttctcttctccttatgctcctctctcactgcacaggtaaggacaggcctcggagatcaggactcagttttcagcctgcatcagtccctcaggctcaggaacccatgacaaatttcatcctcatcttaaccctgtctcttatttgtgtctgtgtttacaaattccctctcccagcttgtgctgactcagctgtgtcctcccccctacttcctgtatctctgggagcatcttccagactcacctgcaccctgagcagtggctgcagtgttgacatttatctcatatcccgctgtcagcaaaagccagtgagcccttcccagtatctcctgatctacctctcaaaagtcaagtaaaactagggctctggagtctccagctgcttctctaaatccaaagatgccttggccagtgcaggcaatttgctcatctctggggtccagccagaggacaagactatctgttctatctattactgtcagacctgggatattgatacttcagttacacaggcagatgagaaagtgagacgaaactcagcctactaagaatggaactatggctctttttccaattgtcaaataattttcacatacacaaactattttggaagtagctactgattcacaatggttctctcaatgtcccattcaatgtttctgagtcctcaggcaaactaacaacaaaacaatgataaaacatatgacaaaacatatgataacactgactctttccctgctgaaccacatgtaataaaaccagaggagctggtttaataaaacctgaggagctgacttttcttttaaaagaaaagatgacagtcttttggagtctttttcttggtcaaaatttcctagaccatcccagcaggtggacagtcccctacagaagacacgatcctgggaggaatcccaggtacagagctggcctgcttcacttgtgggtacctgccccttcaattgtgaaatcagggaggggagagtaagcatagggggtaggtgaggatcaggaaaggggcaaggccactacatttcattaaccacctttggactccagtgcaagatagaggctgatgatcccatcacacaggtgactacaacctccttgtcatcaacagctcctgcccatggggaagcgaaatgaaaatctatccccatccctctcttcttacatatccctgtcctgcccctgccggtgaccaacaccagctcaggttgaattttgttttgtcacttgtgctattaaagaaaataactccttctcttactggtctcctagttcagacagaatcagtttgtttccagaaatagaaaacgctgctcacacacatgagtgtaaagtaaggatgacaaaaagaaaaaatccaggctatgtggcccagagacccaggtgccctctgattggcctcatagatgtcccctcctcctggcccaggtttgcttgtcattccttaagctctggaaccttgaactacatgggttctgtcttcatagatacagaagaaaaccctccccaagaaggagatggttcccagaaccagcacatgctcacttttctctgtttaattccacacatctgacttatttttgcttccatgagcctttgttgaagatatctctgaatacctctcatttctgttaggtctacagcctatggacctatctccattatatttgtgcttatttttctaacctttatgactgattatcatttaagcttaatatgagatatgcatctatattaaagatatataaatatgtcatcaatggtcaatattattaaagttataagtagtaatgcaaaattgtagctattatatcatttcacttgttcactaacattaatatgtgaagtgagaagatcactttattaatcacgcactcctggtcatgtgtgcggatgagtaagctcaggggggatgctgccatggtccatgggaagcctcaagaacagcagacctggcacatcaggcacaacatgggacacagggagtgagccatgtcagcagaaagcagaatagactgaggcatcagaaacaacccattgccaaactctccactgccttcctgcatgggtcagaccagagctgctcaaacataacgtgcacacagatcatctgggctcctggaaaatgtggactcaggggtctaggatgaggactgagattctacacttctaaagatcccttctcctacaaatccacatatgtgtttctgtatcacaaaattagtaagaatgggggaaaataagaaggaaagccatttgtagacaggaagcaaagaaacatctttcgcggagagaactacagaattttcatgaagaaagacttccagttgaggcaggcagacaaccagagaggacagccgagaagactgaggaggctcctctttcttcacaaaacaaacaaatgaaagcaaaaagacaccaagcctcccccttacctgccctgccctctggctcctgtccaatctccccaccagcttctccttcagcctcttctaaattgtggaccctcctcaccttcccttcaggagatgccctgagtccactgcttctctttcccaaccccactagcaccttccgctacttcctgggtttctcctcagctaccagagaatgcagtgaaccatccaatccaaataaattatcctgttaaacattgaccagtaggtctcctttgtgcggatctgaggaatcaagcagggagaaagaacctgactttgtgagctgcctgagaaatgagttcatggctgaagtgtcccttttctcagctaacatgttttatttcatgcacagggtgtatacagagacaatcttcccctgaggactccataaaagatggggagaattgtgtgtccagttcccattgaggagacacacacagaaaactaaaggctgaggtgaggtaggaggctgccctgaggacgggccttgccctgcccttggtcagggagtgagcagtgttcaagaccctggtggggacaggaggctctgtcaggaccccggcatctggtcagagacacggtggacctggacttgagcagcaggggatgctgtggccctgctgctgagccctctgtggggctgtcagctgggaaaccagaaccctgtgtggtctgtgctcagagatcactgggccaagtagctggatcctctgtgggctcctggggagcctcaggccaggctggatcctctgtgggctcctggggagcctcaggccaggcccaagttaggcccacccctcccagaaatgacacagccattgccgctgcatacagccccagggaggggtacggttgggcagaagagagacaagtttgcatgaagggcccctctctctcttctgggactaccggatggataagagggacctgcatcatgtcagcctcagcagagctctggggtgtttgcaccatggcctggaccccactcttcctcctcctcaccctcctcctccaccactgcagaggtcaggatggcccttagcaccctgatcctgcagctcactcacactgcctcacaaactcataccaggaatgtccttccctcttatccttacttcaggccataatgggcgtctatgtcttcagggtccctctcccagcctgtgctgactcagtcacccactgcatctgcctccctgtgggagcctcggtcaagcttacctccactctgagcagcaaatacagcacctacattattgagtggcatcagcagtagccagggaaggtcccttggtacttgatgtatgttaccagtgatggaagccacaaaaatgggatccccagttacagttctcaggatccagctatggggctgatcggtaggtcaccatctccaacatccagtttgaggatgaagctgattgtatctgtggtgcagatcatagcattggtgtgacatatgggtaaggcaaagtgaccccagtgaatgaggaagcaggacaaaaactgttttctctgctccactatgaaggctgccacgtggccctgagaaacagtgcctgttttccttactactcaagaaagatagatagatagataggcagatagctagctagatagatagctagctagacagataggcagatagctagctagctagctagctagacagatagataggcagatagctagctagatgctagatagacagatacctagatagctagatagattttttgctttgggttccttaggaacaagtttgctaggccaagctcctaaggagtacacaagtctgtattaatgtggccaatattaaggcagatcctgtcaccccctgcatgtcgatacattgtcaccacatgggaactgcaaggacatttttccctgtggatttaaacactggaactctgctgcatggcacacccctgccacatcaagtttcattttaacaatcacccataagatataacttcttaagaaaattttgaattctaacaaaatgctagaaatcacactgttgatacacagcgatggaaataatgaaaatttatagacagtgaaataaaaagatttaaaatttttggtggtttataaaggttttctcagttgttcagtgcgtgggttttgggattaggagaaaatgaggagaaactgcctccaccacattgaacatgacaactgatttgcaataatctaacaaagaagaaggatataaataatcattaatgtcatcctgacagccctgatcctaaatgtcagaattttatttcttaacttttttctccaaaaaaaaaatgtagcttcagaaaaacttctggaatggtggtatgaggccatcagaaaacctgattcaccatacaagcaatgagaacagcagtaaaaatgatataaatctacttttcagaactctgtacattaccaaaagcttacaaaattctgggaatcataaaaaatagtaataacagccagacatggtggctcatgcctataatcccaacacattgggagctgaagcagagcgattgctttatcactcctgggattttgtgatcagactgggcaacagagtgaggcctcttctctaaaaaacattttaaaaaagtagctatatgtggtggtgtgtgggtgtagttgcagctactggggaggctgaaggtggaggatcacttgagtctgggaggtggaggctgcagtgggctgtgattgtgccactctacttcagcctgagtcataaagcaataccctgtctgaatcaatcaatcaatcaattaaaataatgtggaatctctgtaagaatctgaagctttgtggtgattttatttcttttgctctctcccaagttccacagtagccttaaaaaccaacagcctcaaatctcctggatctagggaaactagaaaaatagcattcactgaagcaaccaaataccagatctggaattttctcaaaagccccattcccgtgcgactgtcattatttgagctttccaaagctcagaaaagcttcacgctctgtacttttctaaatgtgaattgtctcagagctcgcttggtttaaacagcttcatcctcaatacatttatcaaaacaatcagtgagatctgttaaggtcctgagtcagtgatacaagatggggtcaataaaaggctgaccaaaaaccttgagagaaaaaaactgggtgtcagaatctgtagaagattttgatgagctctgccatattcctggaaagacagaagatcactctcatgctcagagttatgtgcatggccaggtaaaaattaggaaagtccttaattttcgacactggctgaaatcaacaaggaaggctaaaatagagttgtaaagtggcggggttttgcagtcatgacccaacccctgcacagagcattcggcaaatgctgaggaatgtgttgttcgaggcgtttaagaacatgtctgtccaataataagctaatgactgatataattgagcagagactgcagtggctgcacaagcaaagaaaacagacttagagaattattccagtaccgtgaaacaataaatcatcatcaacaataacaactacaacaaaaccagaagcaattatgacaaatattttaaggaaagaatctgatttccagaatcgtcacattgtgtgactgagaagctccatttggcaaagtgaaattttgaggcagggacacagcaaagtactgtccatacacagggttaaaaaggaaagcaaagcaaaacataaaaacaaacaaacaacattaaaaataagttgacaaaatgatgtccagagatgcatttggtggttactacataaaaacttcaaattagcttttgtaaatgtggtcaaataaataaataaaacaacgttaacaattgttaaggaaagtacggaaagaatgcctcattacagagagaacattggcggggtgcagtgcctcacacctgcaatcacagaactttgtgaggccaaggcagacagatctcttgagcccaggagtttgaggctagcctgggtaacatggccaaaccatgtctctacaggaaatacaaaaaagctagctgggcatggtggtgcatgccagtagtaccagctactcaggaggctgaggtgggaggatttctggagcttgggaggcagaagttgcaagagcaaagatcatgtcaatgcactccatcctgggggacagagcaagagtctgtctctaataataatataataataataacaatagagaatactaataaagaggtatagaagaaaggatcattgaattaaagacagataaattgataattattctgttccaagaatagaaaaaaatgacaaacagtctgcacaacctgagagacgatgtgacaccaatcaaatgttccaatacacacatagtaagtttcagtccttccaccatgtgagctcgcagtgagaagatggcagtctatgaaccagtaagcacatccttaccaaacaccgaagtatctgcttgtactttgattttggaccttccagcttccagaactaaactctgacctattttttttggacatttgcatagtgtgggcctcagaaggaagctggctggaatttgacatcacagccactagtagtctgtgggttgtaaccccacagcataacatggggcttcagctgagcgtagtgacagaggatggagtccacatccaccctctagctgcagacctggtgggcagagacagcacttaggctatgcagcccttcatggtggctttcttcaaagtcattgtggtccatgtgtgcatcaccaggtcagcctctggctggcgttgacagcagagttgtactcactttacccagtcccactacgtggctcaagtctccagtacttcagattacatcagcagcaaattaaaaacagcctgcaggaagcatgagctatatgtgagcttccaagacctggatggcaggactggttcatcgcacccaagggctatgctgctaattactgtgatgtagaatgctccttcccaatcaatggacatgtgaatgcaatcaaccatgtgatcattcagaccttggttcaccttatagatcctgaatatgtcccaaagctgtgctgtgtgccaactaaactcaatgccattttggttctttacttcaatgacaattccaaaatcaccttgaaaaaaatacagaaatatggttgtaagagcttgtggatattgctaacttgaaaccagatgctggggacacacattctgccttggattccttggtcatagctgccttaaaaaacatacagaagcacagtggaggtggagggataagactttgaaaccatctcatgctgatgccttactgcccgagaaaaattttaacggaccttgctaataatttgctcacttggtaagtaacatgagtagttgttggtctgtactaagctgagtttggttgtctggtaactacagaaacttaaacttaaaaggtaccccccaagcccaccaaatttaattttagctatagttcaagctatttgggttattagtgagtaaatagggaaaataatctcaatggagttaaatgtattcttgggtaaagtatcagctggtttattagtgtctatcaaaggtacattttacagatagtgaaagttggggaagtaggaataactcctctattcacagatttcattcccaggaaggcaaattttatactggatccacagtccaggccatagcccgggctccttggggatgcctctgtctcagtctttgctgttatgagtttgtgctggagttctgttggtgtgaaaatatacttatttcagtcaaaacaaaccatatcattttcacatctcagtcctccatttgctgtattctttgctagtacccaaagtagactgattaaactttgaagtgaggcttagaggagtggaaagcatttgtgacaggctccatggtaactgtgtaacatgtgaaagcaatgctgcacctcttctttattggaatgactttttgaccagcacattaacttgaggactgccgactctaatatctatttcaggaaagcggtgctttgtctttttactacagagcataccacgtgattgggttagaaccaacaaaggaaataaaatgggaaagggtgccccacctttaagaatggctttagggggatgagtgtgccatttatgaatggaaattatgattttctcttgtagaaaggaaggctcagattaaattttagaatatttttaaaatatctttttcaccaacatgtactgggaaagcaatttcatactaaactgattaaatgatagttttataatctataactgcagtaatggttttttgtaaatatgaagtataatttattttatatctgttttgctgtaacattgaaggaaataccagacattttctttaagtgtttatttagaaagtaccaggagatggttccaagatggccaaataggaacagctccagtctacagctcccagcgtgagtgacgcagaagatgggtgatttctgcatttccaactgaggtaccgggttcatctcactggggcttgttggacagtgggtgcaggacagtgggtgcagtgcactgagtgtgagccgaagcaggatgaggcatcgcctcacctgggaagtgcaaggggtcagggaattccctttcctagccaagggaagtggtgacagatggcacctggaaaatcgggtcactctcaccctaatactgcgcttttccaatggtcttagcaaacggcacaccaggagtttatatcccgcacctggctcagagggtcccacgcctacggagcctcactcattgctagcacagcagtctgagatcaaactacaaggtggcagtgaggctgggggaggggcgcccaccattgctgaggcttgagtaggtaaacagagtggccaggaagctcgaactgggtggagcccaccacagctcgagaaggcctgcctgcctctgtagactccacctctgggggcagggcatagccaaacaaaaggcagcagaaacctctgcagacttaaatgtccctgtctgacagctttgaggagagtagtgattctcccagcatgtagcttgagatctgagaatggacagactgcctcaagtgggtccctgacccatgagtagcctaactgggaggcaccccccagtaggggcagactgacacctcacatggccagatacccctctgagatgaaacttccagaggaatgatcagacagcaacatttgctgttcagcaatattcgctgttctgcagcctccgctgctgatgcccaggcaaacagggtctggagtggacctctggcaaactccaacagacctgcagctgaaggtcctgactgttagaaggaaaactaacaaacagaaaggacatccacaccaaaaacccatctgtatgtcaccatcttcaaagaccaaaggtagataaaaccacaaagatggggaaaaaacagggcagaaaaactgaaaattctaaaaatcagagtgcctctcctcctccaaaggaatgcagctcctcaccagcaatggaactaagctggacagaggatgactttgaggagttgagagaagaaggcttcagacaatcaaacttctccgagctaaaggaggaagtttgaacccatcacaaagaagttaaaaaatcttgaaaaaatattagacaaatggctaactagaataaccaatgtagagaagtccttaaaggatctgaaggagctgaaaaccatggcacgagaactacgtgacgaatgcacaagcttctgtagccgatttgatcagctggagaaagggtatcagtgattgaagatcaaatgaatgaaatgaagagagaagagaagtttagagaaaaaagaataaaaagaaatgaacaaagcctccaagaagtatgggactatgtgaaaagagcaaatctacatctgattggtgtacctgaaagtgatggggagaatggaaccaagttggaaaacactctgcatgatattatccaggagaacttccccaacctagcaaggcaggccaacattcaaattcaggaaatacagagaatgccacaaagatactcctcgagaagagcaactccaagacacataattttcaaattcaccagagttgaaatgaaggaaaaaatgttaagggcagccagagagcaaggtcaggttacccacaaaggggagcccatcagactaacagctgatctctcggcagaaactctgcaagccagaagagagtgggggccaaaattcaatattcttaaagaaaagaattttcaacccagaatttcatatccagccaaactaagcttcataagtgaaggagaaataaaatcctttacagacaaacaaatgctgagagattttgtaaccaccaggcctgccctagaagagctcctgaaggaagcactaaacatggaaaggaacaaccggtaccagccactgcaaaaacatgccaaattgtaaagaccatcgaggctaggaagaaactacatcaactaacgagcaaaataacaagctaacatcatgacaggatcaaattcacacataagaatattaaccttaaatgtaaatgggctaaattctccaattaaaagacacagactggcaaattggataaagagtcaagacccatcagtgtgctatattcaggaaacccatctcacgtgcagagacatacataggctcaaaataaagggatggaggaagatctaccaagcaaatggaaagcaaaaaaaggcaggggttgcaatcctagtctttgataaaacagtctttaaaccaacaaagatcaaaagagacaaggctgttacataatggtaaagggagcaattcaacaagaagagctaactatcctaaatatatatgcacccaatacagaagcacccagattcataaagcaagtcatgagtgacctacaaagagacttagactcccacacaataataatggaaggctttaacaccccactgtcgacattagacagatcaacaagacagaaagttaacaaggatatccaggaattgaactcagctctgcaccaagcagacctaatagacatctacagaactctccaacctaaatcaacagaatatacattatcagcaccacatcacacttattctcaaattgaccacatagttggaagtagagcactcctcagcaaatgtaaaagaacagaaattataacaaactatctctcagaccacagtgcaatcaaactagaactcaggattaagaaactcactcaaaactgctcaactacatggaaactgaacaacctgctcctgaatgactactgggtacataaagaaatgaaggtagaaataaagatgttctttgaaaccaatgagaacaaagacacaacataccaaaatctctgggacacatttaaagcagtgtgtagagggaaatttatagcgctaaatgcccacaagagaaagcaggaaagatctaaaattaatacccttacatcacaattaaaagaactagagaagcaagagcaaacacattcaaaagctagcagaaggcaagaaatgactaagatcagagcagaactgaaggagatagagacataaaaaacccttcgaaaaatcaatgaatccatgagccagttttttgaaatgatcaacaaaattgatagactgctagcaagactaataaagaagacaagagagaagaatcaaatagacacaataaaaaatgataaaggggagatcaccactgatcccacagaaatacagactaccgtcagagaatactataaacacctctatgcaaataaactagaaaatctggaagaaatggataaattcctcgacacatacaccctcccaagactaaaccaggaagaagttgaatctctgaatagaccaataacaggatctgaaattgagacaacaattaatagcttaccaaccaaaaaaagtccaggaccagatggattcacagccgaattctaccagaggtagaaggaggagctggtaccattccttctgaaactattccaatcaatagaaaaagagggaatcctctctaactcattttatgaggccagcatcatccttataccaaagcctggcagagacacaacataaaaagagaattttagaccaatatccctgatgaacatctatgcaaaaatcctcaataaaatactagcaaactgaatccagcagcacatcaaaaagcttatccaccatgatcaagtgggcttcatccctgggatgcaaggctggttcaacatatgcaaatcaataaacgtaatccagcatataaacagaaccaaagacaaaaaccacatgattatctcaatagatacagaaaaggcctttgacaaaattcaacagtccttcatgctaaaaactctcaataaattaggtattgatgagacgtatctcaaaataataagagctatttatgacaaacccacagccaaagtatcatactgaataggcaaaaactggaagcattccctttgaaaactggcacaagacagggatgccctctctcaccactcctgttcaacatagtgttggaagttctggccagggcaatcaggcaggagaaagaaataaagagtattcaattaggaaaagaagaagtcaaattgtccctgtttgcagatgacatgattgtatatttagaaaaccccattatctcagcccaaaatctccttaaggtgataaacaacttcagcaaagtctcaggatacaaaatcaacgtgcaaaaatcacaagcattcctatacaccaataacagacaaacagagagccaaatcatgagtgaactcccattcacaattgcttcaaagagaataaaatacctaggaatccaacttacaagggatgtgaaggacctcttcaaggagaactacaaaccactgctcaacaaaataaaagaggatacaaacaaatgggagaacattccatgctcatggataggaagaatcaataccgtgaaaatggccatactccccaaggcaatttatagattcaatgccatcccaatcaagctaccaatgactttcttcacagaattggaaaaaactgctttaaagttcatatggaaccaaaaaagagcctgcattgccaagtcaatcctaagccaaaagaacaaagctagaggcatcatgctacctgacttcaaattatactacaaggctatagtaaccaaaacagcatggtactggtaccaaaacagagatataaaccagtggaacagaacagagccctcagaaataataccatgcatctacaactatctgatctttgacaaacctgacaaaaacaagaaatggggaaaggattccatatttaacaaatggtgctgggaaaactggctagccacatgtagaaagctgaaactggatcccttctttacaccttatacaaaaattaattcaagatgggttaaagacttaaacgttagacctaaaaccataaaaactctagaagaaaacctaggcaataccgttcaggacataggcatgggcaaggacttcatgtctaaaacaccaaaagcaatggcaaccaaagccaaaattgacaaatgggatctaattaaactaaagagcttctgcacagcaaaagaaactaccatcagagagaacaggcaacctacagaatgggagaaaatgtttgcaatctactcatctgacaaagggctaatatccagaatctacaaagaactcaaacaaatttacaagaaaaaaacaaccccatcaacaagtgggcgaaggatatgaacagacacttctcaaaagaagacatttgtgcagccaacagacacgtgaaaaaatgctcatcatcactggccgtcagagaaatgcaaatcaaaaccacaatgagataccatcccacaccagttagaatggcgatcattaaaaagtcaggaaacaacaggtgctggagaggatgtggagaaataggaacactgttacactgttggtgggactgtaaactagttcaagcattgtggaagacagtgtggcaattcctcagggatctagaactagaaataccatttgacccagccatcccattactgggtatacacccaaaggattataaatcatgcttctataaagacacatgcacacttatgtttattgcggcactattcacaatagcaaagacttggaaccaacccaaatgtccatcaatgatagactggattaagaaaatgtggcacatatataccacggaatactatgcagccataaaaaaggatgagttcatgtcctttgcagggacatggatgaagctggaaaccatcattctgagcaaactatcgcaaggacagaaaaccaaacaccacatgttatcactcataggtgggaattgaacaatgagaacacttggacacagggtggggaacatcacacactagggcctgtcgtggggtgggggtaggggggagggatagcattaggagatatatctaatgtaaatgacgagttaatgggtgcagcacaccaacatggcacatgtatacgtatgtaacaaacctgcacattgtgcacatgtaccccggaacttaaagtataataataataataaaaagagtcagccccctagcctggcagtgctgctctacaggcaccctcagccctgatcccttcactgcacctaggggacacagtttacaggactgagtcagtgggacaccctgttcctttacattcccagtcatgggctcagattctgcacttgtctcactgctggagggaggagcctgcatcagtcaccctcaaagaagacatgaagttatttcacctgtaaaggcaagaaactgttcgcagcactgggggcaggcttggggaagatgaggtttgtgaggatgttgagaattcatgcagctcatccttcagccctatagctttccagagaagtgtataatgggggtcactaggcatgtgagtaactgatttggtgaaagatgccacttcagatcaaaagtgcatttccccttccccaaggtgtcagcaacactgaaacatatttgactaactttatagaggaagattaagatagaggatgagagagacataaggcctcaggaatatcttagccaatagaaagcctgctggaagatgcatttccaatatgattagactgattgaaaaccttgaaactaaacacttccaaaggagactgggacccatttctcctgagaatgacaacacaaaaaatagtagaggaaaccaacaaaccaaaagcagacactgtttcagatctattgaaaatcctcaagatagtctcataatataatattcaaaatatctaggatacaattcaaagaaacacttgttatatcaagaagtagaaaaattcaccatttgaatgagaaaaggcaatccagacatcaacgctgagatgatttagggctgaaattacctgacagatatattgaaatcagccaccataaaatcctgttgatgagcaatttcaggcattcttgaaacaaatgaaaaaggataaattctcagaaaaaatagaagtcataaaatcaaactaaatataaatacaaataaaataaatgaaaaatttaaaaatacctctctggagagactcaagaacaagtaactatgaaactaaaatccacgcattagagaagacacttaacactgttaactagagaagcacaaaccatagttatcacagcccagcagggcgagcaatcagtctgctcagaagtgagaggcctgaaaaaaaactcctggtgtccctgatggtgaaatctggcccctgatcccagggttcctccctcttcgtgctcagagggctagacctagcagtgaagggttcccaacctcaccctatgcggcccctccagaaggcagagcccattcttgctgatattcccgatctccaataacacaaagtgaaagagaatgtcttaaccagagtactgagtcttggcctatctgaacatatttcaaagtttaaatgtacagtgagcataggatgctgagcagaggccccctggacagtggctggagttgggagcagtgcaggatggaaggacaggtcaggggccctgagcacctgtacctgcacctgcacctgcccagggtggacatgactcccgcatccaccagagggcgttgtggtctaagcaactaatcagagctccccagatcctctgctgttttccctccacctgctggtgtttctgtgccctccagatggtgttgctcctcccccttctatgaccacttttcagccataaccttgtctgaggtcaaaggagggggttgtgcaaccttcagaaagggagaaatttgcatggagccctaccactctgaggatacgcgtgacagataagaagggctggtgggatcagtcctggtggtagctcaggaagcagagcctggagcatctccactatggcctgggctccactacttctcaccctcctcgctcactgcacaggtggctgcctgcaaggaattcagggagcgttcctggatgtcacctgggctgatgatctgttcctcctgcctgggaaccagtcttcatctctcccgactgatctctgtgttgctctcttcttgcaggttcttgggccaattttatgctgactcagccccactctgtgtcggagtctccggggaagacggtaaccatctcctgcacccgcagcagtggcagcattgccagcaactatgtgcagtggtaccagcagcgcccgggcagttcccccaccactgtgatctatgaggataaccaaagaccctctggggtccctgatcggttctctggctccatcgacagctcctccaactctgcctccctcaccatctctggactgaagactgaggacgaggctgactactactgtcagtcttatgatagcagcaatcacacagtgctccagacccatggggaagtgagacagaaactccccagagcatctctacctgggccagtctcagcctgtctccaccagagagggtagctctcccatctctcctgtctaagtgcttgaggtgaactttgcttatgacttcctcttttccttttcaaaataccaatctgtttttccacaccttgatggctgattttctgatatgtgcacgatcaattgtgggataaatgtagtttataatcgggtctctgagccacaccatgattgatgttctggttggggctgccttgcacagtataagttattgacttgcatctctggcctctacccttagatactattaacaccctcccctcatttgtgacaacaagactgtcttgagacactgccacatgtcccatgcttggggacaaaatcagcccaggttgagatactcagttaaagagcatgtcttcagctactaagaagcttggctttgaaatgtgtttatgccattctgctgagcatgaggctggttttctaatttttgtttctggttcccatctatgagacaaaacaataacaccaaacttcaatgttttgatggttgaatggtttttccaagcaacaagaagtcagagattgtgctacttagaggtgtagaagccctaaccagatcctgtaacacagagtttagctctgactaggacagcacacaatgccttccatcaatctccaacccacagcccgcaggctgcatgcagcccagaaaggctttgaatgtggcccaacacaaatttgtaaactttcataaaacattatgatttttctgcaattttctatagctcaccagctattgatactaacagttagtatcagttttatgtgtgttccgagacaattcttcttccattgtggcccagggaaatcaaaagatgggacacccctgctttgcacttttgtacaatgcacatggaaatataatagagccttcttccttctaaggtcatgtgactcagccattgaaaggtggaagtgctgaaatgagctccatatgaacggaccttgaaaaattatgctcagtgaaaggaacaaatgcaaatatctagaaatgaaatgtctggaaatgactgtatttataacaaatgtccatgatacgtaaattcatggaggctgaaaagatcgagattatcctcaaaccttgtgataatttaggtgaaaaggatgatttcagaattggatagaaagtgatctacttcaaaaataagctggaaatgcctccacgaacagaggcgatgctttgcggaatcctaggtggagaagtgtatcaggtgcagatgaggtctttaagaatacttcttgttttgttttgtaaaattaaatatgaataagaacactgtgggccaggcgcggtggctcacgcctgtaatcccagcactttgggaggctgaggccggtggatcacgagatcaggagatcgagaccatcctggctaacacagtgaaaccctgtctctactaaaaatacaaaaaaattatccaggcgtggtggcaggcacctgtagtcccagctactcgggaggctgaggcaggagaatggcgtgaaccagggaggcggagcttgcagtgagctgagtttgcgccactgcactccagagcctggctgacagagcgagactccatctcaaaaaacaaaacaaaacaaaaaaacactgtgcttgctcgcttacctcctcctcaggtcatttcctgcagtctctaagaacagtccgcctggcttccccatctcctccctgagcgccagcatctggggcgtgaacagcacaatcaaggccacacctgtgagaccctcagtgcgtcagcagagctgtgtcctggtgatgtcaagggacacggggtcagcaggggacctgtgaggctgtctcagggggtgagcatgtctggccctgccagctgggaaggccctcaggaggttgaggggagctgagcacacagtgagctcactgagctgagatgggaagtgactgcagctgtcaggaccttcagggacactcagtctaggatcaggctctctcaccctgtggggcctggttcaggtcaactcctcatcctcctcttcttcctccagacaagagagacattgcctatggctgaggggtcctggaggtgatccgggtgcagggacttatttgaatgtaggaaattctctcccagtgagacctgtagagactaaaagagcgttaggaacattcactgttacggctggagtcttagggtgcagatctcttgagcacctgcaccatggcttggcccctctgctttttgacctcttccctccctgcccagctgaggcacatcctgctctggggagaagggtctatgcggtcctcagcccacctctgctccactccctttctcacagggctcattgttttctctttctctccaccctcctgggtctgtggtccacatggcactgacagcctctttcactgaccaagcctccgggactgacaattacaatcacccaccctggaaacagccataatactgtcaatcaaggcacagcttggattcaggagcacctgggacatgtccccaaacctcagacccagagggggtaacaaccatccctcagggacctcagggaatttcccagccccatgttaggcagtttggcctccctggccatctctgggctccaggctggcgacggtgctgattttcactatttagcacagaatggcagcctcgctgattattctctgattatctggatgctctgtgactccttctgtgcatctctgggatcatcattcagactcacctgcaccctgagcagtaacatcaatgttgtttgctatgacatttactggaaacatgacagggcagggagccttccctccctggtatctactgagattctactgagattcaagcagaaccagggctcagggtccccagcctcttctccgtgtgagtgggtgccgtcgccagtgctgaggctttccatatctttggtctcaagcttgaggatgaggctactcatggcacagtagtgcctctcacagtgccatggatgggatgttctctctaaaatagaagtctttttttttttttagtttggcccctttgataagtagattctataataattaaagaaaaaaagtaatgtcttttttggagagtagaaacactggtgaaagagaaaccgggaaggacttggcatggggggtgggtgggcttcaggccacggctctgacccccacgaaaggagagaaggaagggggattagtaggaactgccccagcccacaggcaggtcagacctcagacaaagcctcagccaactgagtgggttctttcccacgggtgcccattacaagtgccctgcttcctgcaggaagacctgcctggagggaccctggggtccccattgcctggagccagcccacgggcaggggacatgttagtcacttgtggtcctcctgcacgttctcccaaagaggcatctgagtgggacacttccacagccgccaccagcactgctgctgcattccccctcaggacaggggcagtgccttccttccccggctcatctacctgagccccatgtgaagtcaaagcttaggtgtctcagggctttcctccaacaggccctgcagccactgagacccttatataccctgagctgcatgctgtggagagagggtctgtggaagaccttggctcttagccatcgactcctctggggaacaccatgaaatcctcagactggggatgtcctctggagccatctttatcctcttcttcttcccagtatctcctgctccatgatctgggtcctgtccctggccctgttgcatctccagtgtctgatccatgccagcccttccttaaatatgtgttgaacccatttcccatttgcccaagaaatgagtgctggcaatgagctgcactttttttttttctaaatgggaaatgggtcaataaatgaatgaatgaatgaataacaacgcaacctgagtctcctgtcacatggttattttaagacctgcgtttttctttacccaggaggaaaatgagtacctgcagccgttattgcctctgaattgagctaacttgtttctacactgtcatgccatggtcacagtgggacagatgtacaccaagcctaccatagctttcagccctgcccttccacccgccccacctgtggcagtgatggcatcaaggcttccctcagagtcggcctctacccaccacacactctgggccatctcctgctctccaacagcctggggttcagtgatccctgtccatgtgttctacctcagagacacctgccactcctccccttccctaatttctctgccatcctgtttctccagcctcccaggaatgtcccctgcccaatctcatgtctcaggttctagaacttgtcctggaacttccccagagctgagtctctaataggagagctgatgacaggcacagccgtggtcaagccctctagccagcagatggaggagaatcagcctgagggccctgtgcatcctccctgctgcacacctgggcccatagccccctccaccctccatatgctcctgcagcccccacctcagtgtctgcctcagtgtctcctcccagcaccttcctcaggaagggcctgagatcttgcatggtgtgtttccccttggtgaactcctagtcacagcagcatcccgagtaagagcctcctggtgaagagatcgtcttggtgctccaccctggcattgtgtcctcagctccagggcaggtcacacgctttcctggaccaagattacatgcaggccacccctgctggcccctgccccacagagggaggcccggggtcaggggtggcaccaagaccacagctccattgatccctgtaggaattcttcctgcatgtttgaaagacaagagttacagaaacaaagcagagggaagattctgggtcattgcaaaaggagaaatttgcctgcagaccagcaggggacgcggtgagaccttctctgtgtatttctgcaggacaggtgctcacagctggggagccctcaactgacagaggcccagggctgctccttcatttcctcctgggactctgcagccttgtcccatctgtgcctggcagagtcctctacacatgaccctgtgtgtggtcccagcagctgctgctttctctggtcccacccgtggggcaaactcttgcttcatgccagcctccctgtccaagggcctggtccctgcgagtgcacctgggggagaggcaatggggaaacacatttgcatggtcagcccctcctctgtgagcccagtgacgctgggataagagaggcctggggcagcccacccctaggtctgtggcctcagaggcagctgtgtccactatggccctgactcctctcctcctcctgctcctctctcactgcacaggtagggacagggctcagagcccagggtggtccccagcctgatctgtccctcatggctcagatccctcagcagctgcgccctgaccctgctcctcactgtgctgtgtctgtgtctgcaggttccctctcccggcccgtgctgactcagccgccctctctgtctgcatccccgggagcaacagccagactcccctgcaccctgagcagtgacctcagtgttggtggtaaaaacatgttctggtaccagcagaagccagggagctctcccaggttattcctgtatcactactcagactcagacaagcagctgggacctggggtccccagtcgagtctctggctccaaggagacctcaagtaacacagcgtttttgctcatctctgggctccagcctgaggacgaggccgattattactgccaggtgtacgaaagtagtgctaatcacagtgagacagatgaggaagtcggacaaaaaccaaggttttaagcttgtcatttttactgaactggttaagaacttcagtggttaataaaatcacattaaatacaggattgttgttaaaaatggtggcacattataactctctcccatttttttcacataatgcccatagtgactctaagcagctaaaatcaaaacacaaaaacttataccaatactaagaaatactaacattactaaccaatttccactagtaaaagagttgtgaaacagctgaaatacatccagatggcataatacataataccactatatacaagagttgtataaaattatgtatcatgtatatataaaattatgtatcatgtatatgtataatatatgaaataaaatgtcagcagacattaccgtcttcccaccagtagccagcaattctgccctgcctctagaataaatggttaccacgggttgaataggcgaacagccctggcagctctgcaggatgactctcactgtttgttattgttttatttttaagattgcttttctttcctattttttttgaggcagagtcttgctgtcagccaggctggagtgcagtggagtgagctcggctcactgcaacctaagcctccctggttcaaacgattctcctgcctcagcctcctgagtagctgggattacaggcgtgcgccaccatgcctggctaaagtttttgtattttttagtagagacagggtttcaccatgttggtcaggctggtctggaactcctgacttcgggatccgccgtcctcggcctcccaaagtgctgggattacaggcgtgaaccaccgtgcccgacctcttttttttttttttttagtttggttttgttagtttagttttgttttatctctttaacttgacagtcagagatgatccatgtggatctctgcatgggtctgggagctgcaaggctcctggtgcatggcccggtcccgcctgccttggcagggctcctccacctggctcctggaggagcagctgcgcccgactaccctgcatggagcccgcggcttagcggcagctcgggaggggcctgatagaaacttccccctgagcaagcagcgccaaacccaggccgccacccaggatggaggctgcatcacccccggggagcccggatcctcgccagggtccaccaggagaagagcacatggcggagatgagcctgcggggctgggagagagagaagacacggcgaagctgcaggtgaagacgctgcactaaggccccacccagaggctgaggttccccgaccagaccagcagcagcgaggctgcccagagcggcgccagcaaggtggttctctccaggtcggatcacaggagaagctagccttgcacctggcccaggcaagaagcaggacatgggcttacgcagaagaatcagcaccgattccacatcattccccatggcaacggcctctacggtgctgtcagcaagacccagtgctagacccgagcctgcaccaggagctgcggagcggagggtgcgccccatcccgatcgtctccaccactttagctccctgggtgagggtgacacggggaagcttattatcgcggctgcccaaaacggggcgtggctgggtaccctgtgtacatagggtagatgctgaatgtgaatagcactgaactactagagggaggctggagaggcccacagtgtctatctaccatgattcattatttgggcccagaggattgcctaaggcctagtatttggctcagttggctcagtaacgggcactaggatgcagtatttgatcactcctatcctaaccaagtacgacaactggtgcaaacagactcaaaagcaaaggcaacgcaatgaataacttgctcactctggggccacatatgctgaataaaatgcctacccttgaaatgtctgaaaaccttacaccctgggaaaattgcatacagaacttgtgcttggagaatgacatgaactctaatcagggtaataacacttgtaaagttcctaacagcttttctttccttttttttttttgtttttgagatggagtttcgcagtgttgcccaggctggagtgcagtggcgcgacctcggctcactgcaagctccgcctcctgggttcacgccattcccctgcctcagcctcccgagtagctgggaccacgggcgcccaccaccacgcccggctaattttttgtatttttagtagagacggggtttcacggtgttagccaggatggtctcaatctcctgacctcgtgatccacccgcctcggcctcctacagcgctgggattacaggcgtgagccaccgcagctggcacttcctaatagcttttctgtgagtgtaacgccataatcatcttttaaaatgttttctcggaactaaaagttgctgggcgcctaaatgatgttgcatgatagttttgggtgattttactgcatctgtaattttctgtttaagtgagcaccgcttaatttgaaagctaatttctcacagtgtaaatctgttcattcctggtagtctattttctacaaaagtgtatttttacacaacattaaaaaatggtgtaccttcatctatgacagtacattacttttgacaagcagctttcaggcagaaattaagagaagtgttttatataaaatttattattttgaacagagtttgtgatttggtagttacgctgttgaaatttgaattttacaattcttagaaacttatattgatgcattcttgttaccaaatgattggcccattacattttgatacaaatagatttgttgttttggaaccattatttgtttagaaatggtcaatcttttagagagaaatacttaacaaaggattgtgggaagttttttttttcttcttctttaacggattgtaccaggtcttacttgaatgaaagtctgatgcttgctgatggcagagtgactaatctgcactagattgatgtttagagcagaatgttgggtgatctcaattgtttttatttatgtttgtgattttgttttaaggtaatcttaacatggtataagactctgtgacaagctaaacctactgcaatatagcatgttggagtcccctaagagttttaaaagctaatggcataaatgcctggagccaacctcggcagttatttcatagcagaagataccgtcttaatattccttttaaattcttttaaaaggcaaaataggatcatcctattttataatgtacaaatgtctgcagagattgtatggtttgttgtgttaatgtttcccacctaaaatctatcatattgccactttgcctaattgtagtcacatttattaagtaatgcagtttgtactttttattttgtaacattctgtgatttttgtacaacattgtatttgtacaatacagcaattcccagttgattgaatgaataaataaaatgtaaaatcatactttataaaaagatctatgtggctgatagaattctgacattcccctccaaatggaaagtgatgtgtttctttaaagtaaaggtagaggagtcttaaatataggtgttcctgcccctattgagaggttttcaaaacatgctcttaatttaacgtttaaatataccagagtcttagaatgtgagaataatgaaattggtttgttttaattttgtgataatattaaatctactggaaagaatattctcctttgaaaagattctcagctcagtgatcatagaacctgtacttgcgtttaattcaatgaggaaagacatagaaatgccacgttaatatcctcatttaggtggtttctcccttcactgatcagcctatgaatgtgtcaatgcagtactccccagtttaggcttaggtacttattgaaaggatgctgcctgagcatttttaataattgctatttcaagatcacattttggccatgaggcaggctgccactcactttaggctctgcctaggcaggaatgggtcctggaagacacatgttctctctctctctctctctctttcacacacacacacacacacacacacacacacacacacacacacacccctctcttctctctgggtacacattattctggacatcttcagtttccaggattctctatgtctccagctagaagtcagggcttagcctgtggtgatccagccaccctcaggttgaatctcgatgaagtcacaggaaccaccagtggcatggagggtaagggatcctgctatcaggttcagccaggaaatgctctggacacctgctggtggaagagtttaatgctgggcaatcacaagtcaggtcccttcttccagtcggcagttcagcctccctgactttctctgggttccagtcagtgcatgaggatgatggtgacatttattcaggggcagcacagcagcctcagtcaccaccaacagtcactgtcatatgagaaaattagatagaaattggccttccaactcttctgtcagatccatctttgccctttttctgcctgcttgagtgaatacgaccaagaccagctcaggtttttgctgatgctatcacacgtgctcctaaaaccagaaggcttaatggtattttctgtttatctttacggattcaatgaaaagacaccttttcttactggtctcccaatgaaaacataatcactatgtccacagtaacaaagatagccctcgttgttgtctgctgggatgagaagagcagcagaagtttggcaggtatggccctcatgggcttcacatgtccctacatctggccctggctttgctgatcaccctttgggctctgaacccacagggaagttaggtttctctttcttttgagattgcctctggaagagctgctctgttcccaggtgcagggcagcccctccgcagtaaggacccagctctcagagccatgaaggcctcaagcctccaggttgactccacatttctagtgcttgtctctggttctttggttggaaagatgttggatgaatagaagttctctgagacctaggctttgtgaatccaacccccattaaatccagggatctttttaacgaataaaatgaatcagggcccagtgatggtggggaaatgggacgtgagggttcctcaggccagtagtatggggagaacatccaaaaagaaaggaggggttccacttttgagaattgtctttttatatccatccacatattgacgaaaattataaaattagactaaaataccttaaatatataacatggtcaaaagaaaagaggtattaccaggataatattaaatagtaaaagaagtcagaggcgaaacagagcaagagacactttttttctgacagcatcattcttatgggctataatgccaaggcttgtgcagtaggagctgaaggaatctcacaggcgaccctcacgacaataatgacaataacaaaataagtcaacctctaaaagaagcccatgtagaattatccccaggtatgaaccacctggaggctcagcagaacattaagccttagattgggttcaagatgaccacagactggtgatgaccacaggcccctgggagcaacacactcacacgcctggtgatgctgatatctggtaaatcatcactgtgcatcctgaaacacattctgtgattagctctttgcagaccataactaacatgaaagaaataatgcctcagctgtaaacactgcagagaggacccactcattctactcccttaggtcatgagttgaaagatccatttgcaatggtcaggatgtccttccagaagagctgggtctgttctgaggggccacccgacttgggatcggagcccagcagggggtgctgttggactgttcctgagagggcagggctctgggccaggccacataggaaaatactggttctcatacacttgagcaagcagtgtcctcactgaagtatgacttcctgcacctgcaccaccgagcaggagccacttcctgcacctcaggagccactgagcactagactcacacgccaatgcttcctattttatcctccgccctcatggagtccttgtccaagcctgcccttcaagcagagacaaatcacacagcaggaacaaatttgctcaaaggaacttgaactacaatgtttcctgggcacagaatgagaaacacttggaattggggaagttcccatcctaacaacttagactcaggaagaagaaccctggagcttctccagcatggccagaatctcagtccacttcaaaatcctcagtctttagatcaggagttcttttagggatgaggtcaaggtttctgggtgcacattaccactgcctttcagtcctatcatctgggcatgaggagcttgttatctcgttctatccattatttctaaacctccttgtagagggctgggttagagagtgctaactgccatttatacagtctggacctttgtataaaattataaacacacacacatacacacacacacacaaacacaaacacacatacttattttgatgttccagcgaaagagtaaaactaaactcaacagaaacagaaacagatttgaataatacaagacaatctcattaatgaacatagaagcaaaactctctcagaatattagcaattagagtccattttatatcaatgaaggattatcttgagcatctgggaggatgtgggttgagacatttgcacagtcattggaagacagtgaacatgatttttgaaaaaacagcatgtttagagatatcaaccagaggtcagatgcttcaatcagagaaagatcctctgagttctcagggctgcttccctgaaaagctacgggagaaggaaatggagtgactggacacaatgccaggggattcattgaccctttggcttcccatgggcagcatgcatcagcatggtcttacaaggatgaaaaagggcatccctcaaaaaagaccgaccatttccccagaaattaataaagaaatatcatggccgggcgtggtggctcacgcctgtaataccagcactttgggaggtgggcggatcaggaggtcaggagatcgagaccatcttggctaacacagtgaaatcccatctctactaaaaatacaaaaaattagctgggtgcggtggcaggcgcctgcaatcccagctactcaggaggctgaggcaggagaatggtgtgaacccaggaggcggagcttgcagtgagcctagatagcaccattgcagtccggcctgggcgaaagagcgagactgtctcaaaaaaaaaaaaaaaaaaaaaaaaatcacagtattttcaccagtgcatttctgtttgagcgaatatgttgggtgaagaaatatataatatatacttttctaaatgaaatttttatctcacaaaattgtagaattaaatttttgttttggataagaaatcaagaaacaatcacacacattcttatgatctcatgaaaaccaggtataggaaaggaagtgacgaccccaaaattcatctaaaaagtgaaggttttggttcaaagataagagggttgtcatgttcaagacaaagtcactaccattcgtggtatttaaagctgttggtacaagtgcctatcattgccgattcccttcaaatttcttgtgtatgtttggatcttaaacatgagcacacacaaaaagagaaacagcaaaactagaaaacagatttacctttttgagtttccaactggaggagaaaatgaacaaagagtaagaatatcacatgataatgggaggaggagtgttaggaaggtgatgaggagcagttcagccttcccagcttggggacagtcttagtggagcagagaaacctccttcctgctgccacctgactctctagagtagatgaagaataaataactaaacataaaaagcccttaggaaaaagattgtcatgatgtcagtgctattaatagttcagttaataattctgtaagaatatgcaaaaacttactggctttttaaaaatttttatttatttatttcttttgagacggagtctcgccctgtcgcccaggttggagtgcagtggcgcgatctcggctcactgcaagttccgcctccagggttcaggccaacttactggcttttatatttggaatcacaacctgaaaggctgcagaacatgaaaggaagaaaactcagattgcagtgttcattctcttttatattatgagtttcctgcaagagctacatctgttattatgcaaaaacaaacagataaggaaacaagaattatccagcctcaagagtggaataaaacatgcactttttttgcttgtaggcataggtgagtaattcagacacggctgctgtgggtgactcatttccccttatgatggagcctcagcaaaaaagcttcacagattggggctgatttggtatgaaggggttggaatcgactgaaggtgacctcattgagagtctgcagtgaagccggccttggctgaatgacctacctgaggcctcccatgtggcctgggtttccaggaagctgggcagtcccagagaattcagagctctgacttggtttataaagtgtcacttccacagaaactgtcagtgccgagagatcactagtgccagatctggttaacagggaggggcctgatctcacccctcaacggaaggtgacgggaaaacaaaggaaaagctgtcttcacatcaacatgggcagataccactttaaagcatattctgtagcagggttcccactccagaagctgtggtacaggatgtgtctcctatggcatgggccaagggagggtaaaggtgagtttgacatctgtctcagtcaccatgaggtttttctgacaactaaatataaatatgtaaggtgtctcacagcacaatcatgtgacaataaatgcagtgcgtgccttcaatattgctctatcaaggaggctttccctccactccaggtgtgagcacgtggcttgcatgtccctccactccaggtgtgagcacgtggcttgcatgtccctccactccaggtgtgagcacgtggcttgcatgcccctccagcttcctgcactgtggtcatactgctgctgcctcattctcagcctgagcatccctacacaggcacaaactctatggctcaggctggtcatcactctgggtccacagtagctggtcagagagaaactgtcttcagccctgcccagcaggagaaaagagcattccagactgatcagctgggttcctgccatccagaagtccttgtctgtctggaggctcaaaacatgactgtgattcctttgaggactcctcccatacccaggctgtgggcttcgctgccctcctcaggacccgtgcagcctgttctatccctgcctcagctgcaggcaaagctgcttgccacaagctccctgctcataggatgccggagtcctcccaagggctgctcttcctggagaagaaggagaaccaggcagtaaggtctacctgagcatcatgggaaggaagtgatccgattctgactccggtgggcgcacacccttggtgctttgtgtctcctgctatcccagccacaggagtgggggaaatgtgtgagttgtagtcctagccgggaataatccataaaaggtgaaggtgagagaaggacactatgcatggtgtcaccttgttttcctcgttgtttcagcggcctgagtcctgtgtttcctgaaagatctgtggctcgaggtgacacgccctatcaggggacaggaatcaaagaggagaatctctgatggaaaaattcacaaaggaagagggagataaaaattgggcaacatgctcagggtgagaacgatggctttttgtccttgtgatagtttgctgagaatgatggttttcagcttcatccatgtccctacaaaggacatgaactcataattttttatgggcaaggacaaacaaccaaacaccgcatgttctcactcataggtgggaatcgaacaatgagaacacatggacacaggaaggaggacatcacacaccggggcctgttgtggggttgggggagtggggagggatagcattaggaaatacacctaatgtaaatgatgagttaatgggtgcagcacaccaacatggcacatgtatacatatgtaacaaacctgcacgttgtgcacgtgtaccctaaaacttaaagtaaaataaaaaaaaaaagacggctttgtgtcaagggctatttatttagtgtctctcgttcccattattaaataatttaacaacaaaaattgccttttctatgaattttcaggaaattctaaccatcattcctttattaaatatctagatatgtacatctacacatatgcatatacatgtgcatatatagacatatattatattatatatatttgtgtgtatgcatgtgtgtatatatttatatatatatacatgcatgtgtatatacacacacaaagacaaattaagaaatatgggaatatagtatacttctttaatttcttaataatgtccatttatatctaaaaaaaagatacccctaaggttgaaccactagaatcattttatttttaatgtggaacaatagaaagcttatggcccataaagatattggataacatatttttctagcaatatgagaaataagcaaaagtgtaaaacatttaaatacaataatttaattcaaaaatatgaaataatttgtattttttagttgctatgtttatctaccaagaaggcattatattattctgatgttcttacacattgttgaattaaagcttgttaaatacaaatgttatcatatgtgcaaatagcatatcaacatttctttttctctcatatattttcagaaatcactttaaaatgtagcagttcataatgttgacaaaatatcaaaatctataaactctgggtttaaaaaacaatgaaatacacagtacacataagaaaatagtgtcaaagctcactactataagagacaatgatcaatattgaaattttctcttacatgaagacgctcaaaacattttagcagtgactagtgaggttgtatccattctcttatgtttatatttatgtttaaaatattgtccttgagaaggagtgtaggtaggtataagcagaggtggctgtgcggatccaagattctagcctgcccccttgatacagcccattaccctagtcccatccaatctcacacatggcccatcatcatcttctgacttgagcggggagagagacggtgggtagagagggaggaaaggagttagttcagagcataggagacgtggtcagagagttggcagagggagggagggaggcacattctgtgggttcacgtggtgctttgacaactgtggatttacttctgaatgaagcatgaagtcattgagagtgtggaacagtaaaatgatattgcaaaataaaataaactaagattccagtgagcatgttgggaatcacaaacactcacagctgggtgaataaacaagtgctgccatctggagaaaagttcctcagcacacaaggagaagtgtgtttgcctctgtcaagcagaagtccacctatacagagacacaaggaaatgtttataaagagatccttattcggagcaaagtattggaagcaacataggtgttcaacacaagtggaatttataacacaaggagaagataaaatgctagccagttggaagtaatacaacttcttatgcgacacgaataaaaatataattatcagttgaaaaacaataacaacaaactcccaccaaattaaacaaaatcaaaagctctcaagaaaaaaacaatgtgccacttattttaaagcagaaacatgcataacgaattcttcaagcttatataacgggctttttggaaagtagactggaggcacattatttcacataaatgggtgtcttaggaagagatggagacacgtataatggctaaaaaatgaaataaatccatagagaggtttttagtgtctagtgataaaagtactaataatattacgtaattaaattccaaaaaattaatacagaaaaatattcttgatttgggggtggtaacagatgattaagtaaagcgagtctacatgagctgctgatgcagtggatgacaagctctctgcagctcattgttagtgagaaggcactgctttgccagaaaccccttttatttagatttctcatggtccctgggtccctctccaacaccatgagcagcttcagaagaggatcaggataaccagtgactctctggctaccatggcccagttgtgtccgagaggtaagaaaggtttgggatcttggacagagtgggacagtgggagaaattcctgagatggccccaaccagcctggaaaccactcagaacctgcattgaagtttagccatcagggtgctcttgagactcggtttgggctgcaacacagacctgtggggacaggggtcaccataagccaggccacctccacccctgggtcagctcatctcctccctctctgcttcagatctttgagtaaccagcacatggaggcccgggaaaagtcagagagcaagatcttatttaaatgctgtgactccacccccatgaaggctttgggagctataaaaaagagacttaggggagcccagtctccaaacagagcttcagcaagcatagtgggaatctgcaccatgccctgggctctgctcctcctgaccctcctcactcactctgcaggtgagagtggaccttacccagggatctgcacccacctctgctccagcttctccactccctggctcagtggactctgatcctgctctcacattcctttctgtcccctctacagtgtcagtggtccaggcagggctgactcagccaccctcggtgtccaagggcttgagacagaccgccacactcacctgcactgggaacagcaacattgttggcaaccaaggagcagcttggctgcagcagcaccagggccaccctcccaaactcctatcctacaggaataacaaccggccctcagggatctcagagagattctctgcatccaggtcaggaaacacagcctccctgaccattactggactccagcctgaggacgaggctgactattactgctcagcattggacagcagcctcagtgctcacacagtgcctcaggccagtggggaagtgagataaaaactcaagagctccctcggcctcactgaacaggcctcacagagcactgtttaaactggaccacccaaaagacaagggatgcattcacaatagtgtacactatttaggactgttaaaaataggaacatgaagtgaaattagcaagcctgccttattaacaaatgtgtgtagggaacatcattgtttatatattagtagttacatatatataatactagtgcatgaacatacatatgcactagcaattagtaaaaaagaaacactaggtttaactaaggaaatatttattattccagagttttcttatccattccatttgaagatgctgggatcaagtcaccgagggtgctgctctctggccttgagaatccactcagcagggccaccagcagcccctcccttctgtggcctgctcatgccctgtcttctcattagaatccccttccctgctgtcacagggatccctggactcctccagatccaaatatgtccaatacatttggttgaggcctcctgggccccacattactgtgtaatctcaacacccacacactcaaaacagtgttcccatgcgtattcttctttcgactcatcactgtcctctaacagccatgggcagtgtgtggagagagcaggtgaagttggagctttggggtacagttgacagagatgttgacattttgagaaaaagaaaacacctatatagctgttttcaggataattttccatcaagataaaaatccacgcatgagagcatcactcttccagtgatgaatgcatggaggatccttctcactctattgttgggtagtgacacctgggaaacttactgtgttatttagtgtgcagacagctggtaaaccactcagctgactctagggaagttgaccaaacagtgtccccactgatgtgtgacttttctccacccatgaggccccactaccctgtcacctcctgagtccacctttcccattgcgttgctttagatttgaggcatctctctcttacctctttaaagtctttacccaagtctggttcaggaagtgctgatacacggtgagaacccagggtgcatatggatggagtgattctgtgcctaggagagcctggccaggggatccaacacagcttgtggccatcctccccgcagtggagcttctggagacagagctctgaggtgtccccaccacaccctggggcctttctccctcagttctttataaaagggatatttgtcatgggcttaggggaagaggccgctgaggtcacacaagacctgccttcttgctctggctcacaaggcacaagtgagctgtgaccctggactctgtgtcagtgctgtggtcacttggtcagaactaagggaagctggagaaatgtgggtagctttgatgcagtctggcaccagaagctccatcctgaagcactctgaaggtgctgatggctgttcactgtgctgcaccctgagcaggaggatgatcatcatcgcagacctagggtgacagcctcagagctgaaatattcctcctggccctgagaaaagtgggctaaagttctcccttctgcgtgtgttacccagtggtttgcccccctttcatcacctgtgaccaacatgggctcattggggatatttgtgctgtcatttctggcacaagaacccaaagatctaagaccataaaatgcatttggtctttcatactgtctattcccatcagggcagacatctatccattaatacattttatttaattttcttgtcttatattttcagagcaatgatgagtaatgagtgaggtaaggggtacctttgcatttttttgatctcagggaaaatgtcctccatgcagtaagatgatgactccggaccaagacaggtgtgtgtgtgtgtgtgtgtgtgtgcgcgcgcgcgcgcgtgcgcgtgcacacgtgcacacgcatgtgtgttaccatatcataaacaaatttatctgtttctgtattcttacgtgatttttattagggatagatattaaaatttgccaaacacattaaaaatctattgatacaatatgatctttggttgtgatgtaataatatggtattataccaaaacttttattaatgttgaacccaaccattattttaagtataaatcccacttgacaatggtgtataaatgcgtaaatctggtgttgaaatcagttcgttcctcaaatttcctggttcaagtgatcctcccacctcagctccttgagtagccgggattccaagtgggtgtcaccatgcctggctaattaaaaacaaatcttatttgtctcaacatattgcccagtctggtctcgaactcctgggcacaagcgatcctcctgcctcagcctcccagaatgagttaacattttattttaaaattttgcattaatatgtttattttattttttatttttaaaatttttaacttttattttaaattcaggtggtacatgtgcaggtttgttacaagggtatattgtgtgatgttgaagtatacaattttatctttttaaattgctcttaatacatatttttaatttaaatttcaacttttattttaaatatagcaggtacacgcgcaggtttgttacatgggtgtattgcacccgggttgtgagcattgtacccaacaggtagttttttacaccattccctcctctccctccccctcctagcagtgcccagtgtctattgttctcatgtttatgccatgcgtgctcaatgtttatctcccacttaaaaatgagaacacgtggtatttggctttctgtccctgtgttagttgcctaggattatgtccccctgctgcatccatgttgcttcaaaggacattattttattcctttttatggatgcatagtattccatggggtatataaactatattttctttatccaacccaccactgacgggcacctaggttgatcccatgtctttggtattgtgaatagtgtggtggtgaatatacaagtgcatgtggcctttgggtataatgatctatttgtctttggatagataccctgtaatgggattgctgggtcaaatggtagctctgttttaagttctttgagaagtcttcaaactgctttccacaatgcctgaaatacggtgtatacgtgttttctttactctacagcctcaccatcagctgttgtttttttactctaattatagccattctgactggtgtgacatggcgtctcattgtggttttgatttgcatatcttgatgattagtgatgatgagcatttctccacagttttgttggccactaatatagtgcagttttaagttcatagcaaaatacagaagaaggtagaaagatattccctatcctccctggctccacacatgtccagccttcccccttatcaacgggtcccatcagaaatgtacatgtcctgtaattgatgaaccacattgacaggtcattatcactacaagtcagtattttccttaaggaatttttctcgctgatgcacatcctatggctatgggtttgtgcaaatatataatgacatatatccaccattacagtatcatgcagtgtatttcccttccctacaaatcttctggctttactgattcatctctctctctcccctaacctttggaagtcgatgacttttctacttttttcctttgtttgactgtaatacacttgaaattatttccccctttttggactgtaatatacttggaatcacgtatcatgtcatttgcaggtcagctccttttacttactaataagcatttaagtttcttccatgtcttttcgtggtttgatagtgtgttgtccataaacatgtagaatatattaatataaagtactttggagctgatcacatcactggccattcaggtttttcaattactgtttgttgaatgacagtgaccagtcagatgacaggaagtcttagaccccctgagaacacagaagatggactgaggatgtcagggtcaccgaggactgcactgggtgctctcatggagggctcagtaggggtgtcctctagttccagtgagcctggactgtgatgggcactcagagaagggtcctctctagcctagcagagcccctgctcacaggcctaccagctgtcccagcagctttccctcccaggtccttccgtggggcagacagagtctcactgcctgttagcccttcctacccacaagaccctcagcaaaagatccttattcagtgctcagggagaggtggggcagatagcagctggggccacacctgcatgaccagctcctcctcgctgaggcctacagcaggtaataaactcaatccatcccactggaccaaagggagctgtgtctaccatggcctggacccctctcgtgcttgtcctcactccctgcacatgtagggaaaaggcctagagacctggggcagttcccagcttgtgtcagcccctctggctcagacttgccaacagcttaaccctgacacctgctccaacaatgtaaatgtttgcatttccaggttccctcttccaggctgggctgacccaggtgtcctcactcccagcatcttcatgcagatcaaacactcacctgcactcagagcatatcggctttcatatcggtggcaaaaataccttcttttccctacagaatccagggagccctccaactatgttctgagattatgctcaggctaaaatgagtaccaggcctctggggtccccagacaattctctgggttgagaggctcctccagagtctcaagttatttggtcgtctctggccttcaccttgaggatggagcagatcatctctctcagatgggctgacagggcatggcttacactgtgctctaggccaatgggaaaatcccctctgcttgtgctgcctgggctcccactaggcccctgctgtttgtgacaacagccagcactggtggtgacgcttcagccatgtatgccctacggtgagagtctgcagcccttccacgcaactatcacttgcagaatgtctgcatcattgctaatagcacattctgagcctcctcacgtttctgtgggcaacaatttccttcccaagacgtgcacatgatacaggagatttatttaccaaataagtttattaggaatccaattataattagaagatattcatcagtgatcgggggaaatacctggtataattaaaatagaatttgatgaaaatataaataaagaactaaattatgaaggtgtgggcagagagtctggacaccctaagggagatggaaaaccattcatccttgccaggaatgaatgtctctgggatgcttctctaacaggaggaacctggagtgagaccaggaacctggagaactagcagctgggtgactggaaaggaaaccatctggggtggggttgggtctgcaaggcaggaggtgtctgggcagagaaagcagggctggggcggagggtcctgcctcatcccattctcctgctcactccttcctagatccctgtcagggcagtaaccatgagcaaggcttgaggctacttcttataaactgtggccctgggcacattccttagctcacctgagcctcagtttcttgatgagaaaaaatcgggacaatagcaaccaacctatctcagagggctgctgtgagaccctgagccactgtttctcaaactgcccctgagatcacctacaacagaatggctgtagggtgaagtttgagaaccgcagtataggtgaggtggtgcgtggggcaggccctcccacactgtaaagtgcagtgtggtgcggtaaaagctgatattcccgcaggcatcctcagagtgggcccaattagactcttgagcactgattccattcaaggtctgcggcttagagaggatggcaaagtgaggcaccaccaggagcttgtccctatgggctccaggccaaggacgtgcctggagatgactcctgccttgtggcgctgtcactgcctcactgtccacattccatcacgcctcagatcctggcttccaccctggtgaaaggaatctttcaatatcacccacccagccacagacgcttctctgcttctctggcaaggctgcaccccctggctaggtgggcagggccaggggctccttgagacagtctgcagccactgagctctccagcctccagggcagaggtacagtcccatggagcgtggctgatctgaaggcagttctggcctaaaaggggtcttgtcccttcctcgtcctcattgctcccaaggccaggttggcagcagtagcagcggggttggatgctattggatgggagaaggtgaatggactcggagtgcagaatcaagctgcggaagccaagggccttgaaggagggtcacacacaagggacaactgcagaggaaaataaaggaacactttgtgattagccctgcctgtggctgaaagcgcagtgcagaagcatagtaaggaaggactgggtggtctgggtttaagacctaggaaccgtctctgctcctccaagcctgaatgagccctataacctaagggtcctggaggtcttgaaaccttctgcggagaaggctccaggtccactgggccctgtgggtggaagagcagagtcacagccccgcactggggacctaacaggtgtggccttgctagggccccagaatgggaccagagtgggtgggagggggcagaagctctgagagcaccccctccttcctgaagcctgtgcttctgagacacatcccaggaccctctatgtggttccccatgtctctgtattttcattcagcttcgagtagctctccaaactgtgttccagggaacccccgtgttaacctgtgagggcctccaggaagggggtccaggtggggtatgcttggtgggctctgggtttccttacaggagctctcatataagtcctggtgcagcctgggaatctactactgagttggggcgggggcgggtctgagtccgaaacattcctgacctgcccctcaaagaaaggtcccactgaacagtctggaaagctgttttgctgagctcccgtcatcactcaatgaggcacgggcggagtgtggagggagtttccaacacacagtggatcccgcacaggtgtctctcctcgggtggctggggaggggagcacaagaaggcactgaggtcagagggcagctgccaccagcacctggcaccacagggcagtctggcctacagggtattttctaaacctggcatgtgaatgggttccatggggcacccagctgcctctaagaccataaggccttgttgtgagaatgggaattgcagcaggtcctgggaagctgccagacgcacacgggcaccatgtacagggcttctcagagatgggagcagggagcaggggacggagaagcgtggggtcaagagcgtggccctgagcagggggctgcagcgaagaccaaggggattcataagccagatccagggagggggtctcccagccccacctgctccactaaactcctctcctgccggagccacagctgtcaaggccgccttccttaaggcatcagggccactgcttgtgcacacagctaccatcagcagcacggattgagatggggtgtgagtgcaaactgggtctattccccagggcttcagggttggggcatccctgcccgtactgccagggtgtagggatagcagggagcactctgggcacgtgtatgcaggctgaagggagacgtattgggtttcggagagggaaagagggccccacaggtgcccagggacacggtaacgctctgacatcgctgcaccagcaaaggggccccagctctggataagataaaatgcattttaatagtttgaagtgccatgaggtgtctgcatggcactgcagcctgggtgagggaggacagggtcatcatacaaagtaggcggccagggctgacatcttgtccttgggccgtctggggttgggcttcccagggggcctcctggcccggccccgccctcgaccctgccttctccctggtccaccgcggtgcatggggtggcaggaggccgcatgcttcagctccaccagctcctggaagacggggtcacaaaagacgcagcccatgtgctgcgcctcatcgcccgggagtggggacttggccttgttgaagtccacatcaagcaaggcggcctcacagacactgcaggtgtcggcggacacccgcacgcggtgggcgttctcgaagcagtgcgctaccacgttgcacttgttgcaggccaccttccacttggggcccgaggtggggtccagcaccagcaccccgctctcacattccacgcactggccgatgcccagcatgctcagcgagtgctggcaggaggggtgcgtacactcgttgcagcccatgcctggcgggagaagggagccctgtaaaggcacgcccactgtgcccacctgccctctgctgcctgctcccaatgcctcaagctcctggatccctcgtcccagcagaaggaactcttcttggccttgctcttggggacagccttgctcatgtttcggctcctggctgccattacccctgttttctgcttacctgaaacctcctcaactttcaaggcccctcgctggcgccatcccagtgggtttcagctgactccatcccccctttgctttgctgccagcttgttactggtaatgccacatgaccctcatgtcactgggccacatgggaccaccctgtcagctactctggcggcagcaggagggcagggatggggtctcactcccggggcagcctgggtgcagactgaggcctgagggggctttctgcagagcacacggtgaatgtgggcagatgcctcactcccgctgattcctggtctggctcggtgctctgtcctgcctgcctggacatgcgctccctcctccagtaatgaggacgaggatgaggatggaggacagtggtggacgctgactgggggtgcccgctcaccgggtgggtcccccgactgctgcatcctcttgctgactcagctccagagggagcactgcacacctgcgcccaggtcctgagggtggactagggttgcctgctcgattctgacacagagagagggtggcaccactggctgaggcctaagcagtgccccagctacatccagggtctctcgtctcagtgccaatgagtgcaggaaaggccagggtgaggggtcccctcagagtccagcctggtgcaaggcaggggttggcactgaacagagactgcagctacctgtggacaggagggagcggctgcactcaccttgatgctgctgttcaacaatggattgctgttgcgcctaaccaactttaagacttggtgggcttgacacaacttaccttgtgataggcagatgtgaatgtgtggtcaacaggtatcttatggtcctccgctagggccaacagcactgcagaagttgttttacaaaacacatgcaattcattactgcagactgcacttagccctgctaagtgcagggctggagggcctgtgctgtgattctcccactggagctcactgcaaattccacatggcatcttttcttaccaccgacccctccagtcccctaaattctgccgagtcttatggcccaagcagcagggctgttttcactgcagccttgtcaggcagcagatgacttttctacgccaggctgcattcaaaggtggcagccttctgtagaccaacgacataggccagaagtggaacatgctgttcccaaaacctgaagagttctgccaggcattatgtttggacgatctgacccatcctgccttgaccacttaggcactcaaaactgtactcacgtgacagttccctgaatcttcatacagattatctcctaccctttatagtgcatgtttcttatgaaggcctccaacatgctagccatttcctactaaactaactcaactagcatgatgtcaacaacacagtcaatcaatgggatattttgtggggtgctcagatggcagaatgctcccacatcaataaaactcacccttatctaatcttcatgttctggtccccctctatcacccaccctcatgatccagtcccatgcctagtcccttgactcctgctggtacctgctggttaggtcttatggctcctctggtgtgtagtcccttttcttccccttttaaaaaatgttttgagacagggtcttttctgtcccctagactggagtgcagtgtcatgatcatggctcactgcagctttgacctcctggggtcaagtgatcctcatgtctcagtctcctgagtagctgggactacatgtgtgagccgccaagcctggctaattaaaaaaaattttttttttttttttgtagaagtgaatgttccgctatgttgcccaggttggtctcaaactgctaggctcaagtgatcttcctgccccaaactcttaggctcaagtgatcctcctgattttccttatccccgtgagcctcctgaagtgctggggttacagatgtgaggcacctcacccagccttttctctcttctcaaaatgagcacatctcctgctgtgttgtgctgggacttaaccctagttctaggccaagagggaaattgggcaagatggtgaagaaggcatattttgtcctagtgagagaggcctctgcaaacaaaggagtttagctctgaataggctgagtttagtccacttctgcaggctcaggggattaaggaaaatcagtgacttaagattttagaggcctcaatccaaataactctatcaatatatatgagggtgttggccgggcacggtggctcacgcctgtaatctcagcactttgggaggccgaggtgggtaaatcacttgaggtcaggagtttgagaccagcctggtcaacataaagaaaccccgtctctactaaaaatacaaaaaaagaaaaaaaaaaaaacaaaaaaaaacaaccctggcggggcatggtggcacacacctgtagtcccagctacttgggaggctgagactcaagaatctcttgaacctgggaggaggcagaggctgcagtgagccgagatcgtgccactgtgctccagcctgggcaacagagcaagactctgtctcaaaaacaccaaaaaaaaaaaaaaaaaaagaaaagaaaaaaccctgacttttctccagcagtctggatcaatcaccccaaacagtccagtgacccctgatggttgagcagcagcactagaaccccaaatttctaggggagacccagcttccagtttattaagttccatgcacttaattcttgttctgcttgattttgggtcagcagttacatgaactcacgtgtttctcaaccagtgttctggagatctggctcagtgcagggctgtggtttcaaagttattcaagcaatgccaccaaaagcctgtaccccagaatacctgccataggccatcctgtctatccctggagacagtcccttcttattgaagatgaagcactttggcccgtagctggttgccagagctttcagaaaagcgtcggagtaaaacaaccatctctgatgacaaaagacttaaaatggctgtgaagagctctattaattcctcaaatattcattgctctattttttatctccttttataactcctactgccaggctattggcctttctacttctatcctctccccgacattcccatcttagtaaatgactccacaagtacttcagctcccattcaaggaccttggattacccttgggtcctctctcttactcaacagcccatcctatgccaagtctcaccaattcttctctctctctacacacacacatatacaaacttatttgtaaacaattattttaaaaaatctctcttctgaggttccagctttcttcttcttttatttttttgagactgagtctcgctttgtcacccaggctggaatgcagtgacacgatcttggctcactgcaatctctgcctcctggtttcaagtgattctcatgcctcagcctcctgaggagctgggactacaggcatgcatcaccacgcccagctaatttttttgtatttttagtaaagacaggatttcactatgttggcctggctggtctcaaactcctgacctcagataatctgcccaccttggcctccaaagtgctagtattacacgatgagccactgtccccagcctctctctcttttttttttttttttttttttgagacagggtcttactctgtcgcccaggctagagtgcagtggtatgatcttggcttactgcagccatgatctcccaggctcaggccatcccacctcagcctcctgactagctgggaccacaggcatgctccaccatgcccagctaatttgtgtattttttttgtagatacagggtttcactatgttgcccaggctggtgtcaggctcctaggctccagtgatacccccacctcggcatcccaaagtactgggattacaggggtgagccaccacacccagtcacagctttctttttagagttcaccacagtttgagtgattatttggaatttttaagtggcaaaaattacaacaatatatttgtaaatgaaagagaattgtgaaatgtatttgaaattttaactttaagattttctttaaaatacccatattgaatgaagagtatcaaagtaactattgcttaaaaaatggggcttcatttgggttaaaacacaagaatcatgaacatgatcaaaattcttcaaagtgcttgcttggaatgatacagagaggattagcaaatacaaatagtttttttttgtttgtttgttttttttttttttttttttttttttttttttaagagatgcggtctcactatgttgctcaggctggtttcaaactcctgagctaaagcaatcctcctgtcttggcctccccaagtgctaggattacaggcattgagtcaccactgctggccaagatgctgatctttttgttgttgttgttgttgcctaggctggagtgcagtggcctgatctcagctcaccacaacctccgcctcccagattcaagcaattctcctgcctcagcctcctaagtagctgggattacaggcatgcgccaccacgcccggctactttttgtgtatttagtagagaggggtttctccatgttgcccaggttggtcttgaactcctgacctcaggtgatccacctgcctcaggctcccaaagtgctggtattacaggcatgagccaccgcgcccagtgatgctaatcttatgaaagacaaccaacaacaaattctgaatactaaagtgtgcgaaatgtatttaattcttttcatagcacagatgagttaacccacgatgtgttgtcccaggcactatggagtcatcttgaatttcatgttctaaacaaacacccttggcctggaggaatgcacctgcatatcacgacaggacctagtgtctcagatttagtccggcagctttgaatttggaaatcctctttggagcttcttctgacacagcatcttttctctctgggaaggtaggtgacacctgagaacagaggcatggtgtggcatcagagatggaggtaagaattatttttctaccacaatcccaggaaaagactctcctgttcctggtgagggtgagagctctggctgaggatgtcctctttcttctttcttctccagaggatttttcagtctctctgcaaatggctgcttcacagccagggttcatcgaaacccctggatcgtcatggccagtggtttgcgtctctccagcgccactccatacgagggtctttctgcatcctgctctcatggtggacttctgagggccatgctcctcatttgcagggctcacaaatattctgtaaatatccaccagtgttctgataacggggtgacccaggacaaactgaccgtctccagggttcaggtcccaggcatgtctagctccctctttcctttcactgaaaactaatgtcctgtttttttccgtatctatatggacctttctgggttcagtggtgtgggaaaaatagattgttggtgaagactcatcttcatctcctgaactgccatcattgcagtgttcagagtggggatggtgcttggaatcattcccttgaccttgccttcgaccttgcattagttttgactttaaaatgtccttatgaaaattcccccaagtacggaagcccatagtctcatcagagatcccaccttttccctgttcccctccatttttttttcttttttgaaatggagtctcactctgttgcccaggctggagtgcagtggcgtgatctcggctcactgcaacctccacctcccaggttcaagcgattctcctgcctcagcctcccgagtagctgggactacaggtgcccgccaccatgcccggccaattttttttatttttagtagagacggggtttcaccatattggccaggctggtctcgaaattctgatgttgtgatctgtctgccttggcctcccaaagtgttgggattacaggcatgaggcactgcacccagccccttcccctctgtttgtgaactccatcccaggatcatggttgagttcacccagcaggttttcttgcctctccagttcttccagtcgagcccacagttcctcatttgtaagtaagcatccttggacttgagatcattttcaaaacctgaggttttggattttgaatcaggtttatgtgcaatccagggttttctctttaattcagacttgttttgaacatgttttcttaggtcaacaagatctccatccccatcaccccatccctgcagatctgctgtgaatgcaactttagattcaaagtttctcctggcttttgtaaagtcatgtagtgctttcctcacacactccttcctatgctccactaaccccactgcttgctttgcagagcactggcaaaaccagttgtccccgaggagaagagtgattttgctggtatccacaagccttcctggtatagaaggcaagaggcccagttggcaccatgagctcgtaagacagcctattgggcaaggtttggagtcgctcttggagggtattacagtccccctttaccttttgccagtgtgcaatttcatcttggcacctagagatcatcttttcctgttctccttggggcctcataacctgttgaggatgcagctgtttgaaggtggccgaggaggctgcacggtggggcacacggtggggctccatggctcctggttctgcgtgtgcgctgtggtcggcactgctcaggctgctgcccccagtcatggcgactgcagtgcccaacttcctccagctgagtcctcatgagatccttcctgcaatcagtgctcccagctcctcagtcccttcaaaagataaatcattccggagatgggcggtggtgatgtagcatgacaatgtggctactttcaatgctaccgaactgcataccaaaaaatggttaaaatgctgaattttatgttatgtatattttaccacattaaaaaaatattagctgggtacagtggctcacacttgtagtcccagcactttgggaggctgaggcaggaggattgcttttagtccaggcatttgagatcagcctgggcaacacagtgaaacccccatctctacaaaaaaactcacaaaattagctggccaagttgattgtgtgcctgtaatctcagcatctctggaggtggaggtcgggggattgcttgagcccaggagttcaaggcctcagtgtactgtaatcacaccactgcactccagcctgggtggcagagcgagatccagtctccaaaataataatagtaataaataatagtaataataataaataaataagtgataataaataaaaatatccacttgggataattatcacaagaactttgctgtcatggttgtgattttttggaacaaattctcatggttctaactaaaccaaatcaaatacaacattgatttgaacgcccatgctcacagcagccttattcacaaaaaccacaaggtagaagcaacccaaatgtccatcgacagatgaatggatcaacaagatgtggtctctccacacaattcagccttaaaaaggaaggaaattccaacacatgcgacaacatgcaggaactttgaagactttatatatactaagggtacccaccccctacctcactgtattcatatgttgaaatctcaacccccaagctgatggtattagggtatgggattattagattcaaagtttgggacataattaggtcatgagggtggagctcccatgatgggagttgtgaccttataaaagggattccagaggcccctcttaccccttctgccacgtaacaatacaacaggaagtcagaagtctgtgaatgaaagagggccctcaccagaacccaaccatgctagcccttcatcttggacttccagcctccagagccatgaggtatcaatgtctgttgtttataaaccacccagaccatggtactctgttatggcagcccgacctcactaagacactaatcaaaacaaaccggtccacaaaaggacaaacactgtatgattccacttacatgaggtacctagagtagtcaaattcctacagacagagtagaatggtggtttccaggggctgaggggagagggaaatggagagttgtttaatggcatggagttttagttttgccaaataaaaaagttctggattagttggacaacaatgtgaatgtacttcatgcttctgagctgtacacttaaaaacggttgcctgggcatggtggctcatgcctgtaatcctagcacattgggaggccagggcagaggactgcttgagccgaggagttcaagaccagcctgggcaacatagcaagactctgtctctacaaaacatttttaaaaaaattcaccaggtgtggtggtgcacacctgtagtcccagctacttgggagtctcaggtgggaggactgcttgagtctggatgttcgaggctgcagtgagctgtgatcacaccactgcactccagcctgggcaacacatagtgaagccgtatctttaaaaaaaacaatggtgagactgggtgcgttggctcacacctataatcccagcaccatgggaggctgaggtgggtggattgtttgagcccaggagtttgagaccagcctgggcaatgtagcaagaccctgtctccacaaaaagttagctgggcatgatggtgcatgtctgtggtcccagctacttgggaggctgaggtgaaaggattacttgagcctaaaagattgaggctgcagtgagctgtgattatgccactatactccagcctaggtggcagagtgagaccttgtctcaaaaaaaaaaaaaaatggataaggtggtaagttttatgttatgtgtattttatgttttttttattttttaaagaaacagggtcttgctatgttgcccaggctagagtgcaatggctattcacatgtgtgatcagagtgtactacagcttccaactcctcagctggagttgaggtgattctgcctcagcctcccgagtagctgagaccacaggtgtgcacagctttgcctggctccattttactacactacagtgtctctctttttacatggttgttgcagtaaaagaaaattcagtgtatatagaaacatcacaagcaattgttttaagattatatgtaaagtggaaataagttgtagactcatatagttgtcaataggttttctaacataagaactttgggtggggcacttgagaactgattcagatggaagatggctctaggctggtggaacagtgttgagaattcctgaatgtgtagtattcctagacctctgtccaccaaattaaagcaggtcccccatcaccatgatcctacagggggcatcccccttagtaacccatggaatctggcccggcctctttctctagcctaaattgagacattctcctccttgtttctctaggcctcagccacactggccttcttctatttccaaacacacaccaagctctctcctgaaacacagccttcccacacaccgcatctctgcctagttcatacactgccggcaaattgtgtattggggctgggcccttcccactgttcagctgtcatcctatttttttcctttgtcaggggtcctttgaaaactacgtattccagaccaggtgcctggacattctctcttatgacacttattaaaacatgttgttggctgggtgcggtggctcacgcctgtaatcccagcactttgggaggccgaggcaggtggattgcctgagctcaggagtttgagaccagctgggcaacatggtgaaaccccgtctctattaaaatataaaaaatcagccgggcatggcagtgtgtgcctgtagtcccagctactcgggaggctgaggcaggagaattgcttgaacctgggaggcggaggttgcagtgagctgagattgcaccactgcactgaagcctgggagactctgtctccaaaaaaaacaacaacaaaaccaaacaaaaccaaaacaaaagaataaaaaaaaatgttgttgtcattattttcccgctagactcccacaagattccccactagactctaagcttcatgggaggaggggctatgcacattcacagtgtctgctcttaccagagagtctcacagagcagccctaacaggttagaccaaagaacaggtcatataaaaacccaagttccaatttctcctgagatgtttttctcctaaaaaccaagttaagaactctaggcctctactgggaagctgcctccccattcagacagggtctccccattaccacaatcccttctagtcctctcttctacttgcctccctaggtgatcattgcaggcatctgagtttgtaaacccgagtttacaaaaggggattagagaaatgcccacatcaaatgatctcattcacccatttctcagattctaggtcctgatggttggcacatgttgcaatgagttggatggggggagtccagccaggacctcagggtagccacagacttcttcaatttccaccctctaaggtttggtcctcagattggaattatgtttcctcaattctctgcagacaggaagtgttgagatctgactcttagtagtaatttaaatgagagaaagagaggaggagggaggtatttttatatcctatttgtatctaaataccagaaaaggtagggagtgggggcttacacctgtaatcccgacactttgggaggccaagacgggagaatctcttgagcccaagagtttgagaatagcttgggcaacgtggcatgaccctatctctacaaaaaatacaaaaattagttggacatggtggcatgtggctgtagtcccagctatttgggaggctgacatgggaggattgttttagcctaggaggtcaaggctgcagttaactgtgattgtaccactgcactccagcctgggcgacagagcaagactgtctcaaaacaaacaaacaaataaacaaacaaacagaaaaacaaacaacccgggaaaatggtactttgggaacaaggaccttggtcaacccaattccttattgaaggaaataacgtatacagtggtccatttcttttttttttttttttgagacggagtctttctctgtcgccaggcttgagtgctgtggcgtgatctcggctcactgcaaccaccgactccctggttcaagcgattctcctgcctcagcctcccaagtagctgggattacaggcatgcaccaccatgcccagaacatttttgtatttttagtagagatggggtttcacaatgctggccaggatggtctcaaactcctgacctcgtgattcacctgcctcgacctcccaaagtgcgtgctgggattacaggtgtgagccactgcacccagcctacagtggtccgtttctaagacaaaatgctttgaattggcttaggtcagcaacctacagaagaaacatgatacactaggtccctgcttggatagccagccaatgcctgcttgtcagcctcccccttccccaccttcgccccttagttgccttcacctgaaccaaagtagtttagtctaagatgaaagtttactagcctgcaaaatagcttgttttgtctgttcttagcctgcccagctacttaggtcataagtctaacacttgaagagcccctaagctaactaagattacaatgcattgtgggctgcaacaaaatgcagcaaaacgaccctaaaataaacaaaaaacaaaaaactcctggcgctcccacccaacaatcaacaggcgagaagtttatgaccccgtagtactcagcctatgaggaactgggggagggacctgtgcactaggggataaactgcttgttgaaagtgtgctgggtgtgcctgtcagacacctgatcttgcaagactgtcattaaaagtctcactttcactgttctccgggtctccgagtccattctttgggttgggatgggcgagactgtttctcacattatgaaaagctgaaggttaagtgaacttggggaatactgcctcctgctggctggatgtcatggaagcctggcccatcagcagagaatgataagctggagttctggagggtctgatttccaaggaatcacccccttggaagctcctctaatacaccctgatgagattaacctgattaggtccattgtttgataaaaagaggaggaagtttaatcacttccacattctttgcccacgactaaccctgattggatttggggctatggttcaaatgtatgaccgattgatttttttcacttcttctgttggacttttgaaaaaaagttctctgaaaaggaatttagaggaaagagacttattccagtgaacagttacagtttgcaaacccaacagacacaacttttggtacaaaaggaagttacattccagagaacaaggggaggctttgtcttttctagagaaaattcccgctcagaatcccactcaggtctgcttatgcaaatgaaagattcaaactttttagttctgattacttggctctagctgggttctgattagtcaaagcaggtcacagtctactggtggcgtaaacaggaacaggcagctatgtaagtcccaaagtttttccagaaactcaaagtatgtgtgtgacctctggtcagcaaataaccacttgtctcaaatttaaattcaggcccaggattcatcttgaggaattggctctttcagggttcagagaccaatcaaaatgtctatcagaatggatgtgttaaaaggcaaataatgggcagggcatggtggctcaagcctgtaatcccagtactttgggaggccgaggcaggtggatcacctgagctcaggagttcgagaccagcctcgccaacgtgatgaaaccccgtctctactaaaaatacaaaaaaaattagctgggcgtggtggtgtgcgcctgtaatcccagctacttgggaagctgaggcagaagaatctcttgaaccctgggggcggaggttgcagtgagccaagatcatgccactgcactccagcctgggtgataagagcaagactctgtctaaaaaaaaaaaaaacagcaaataacgttgtcctgtgccatgagccacatactcaaatatttacacaggtccaggggaagtaaagagtaaatatggccaccaggcgcggtggctcacgcctgtaatcccagcactttggcggctgaggcgggtggatcacgaggtcaggagatcgagaccatcctggctaacacggtgaaaccccgtctctactaaaaaatacaaaaaaattagccaggcgtggtggcgggcacctgtagtcccagctacttgggaagctgaggcaggagaatggtgtgaacccgggaggcggagcttgcagtgagccgagataatgccactgcactctagcctgggcgacagggtgagactgtctcaaaaaaaaaaaaaaaagagtaaatatggcctgatgtgaaaaaaaattataaccaccagaatttcctaaaatgtattttattgatctatagtgttattgcacaacatccacaaatatctatgatgacaattgtttaaaattcaagttaaaatacaaaatttaaaaaagtttacctacttttacgttgttaatttatgactctttgggtttgaaatgagatttgatgtcattgtatttatagatattccttgacttcttgtgttatgtaccaataagcacattgttaagttgaaaacatcataaataaaaaatgtgtagctgggccaggagctatggctcatgcctataatcccaacactttgggatgccgaggcaggaggatcacttgagctcaagagttcaagaccagcctgggcgacaaagcaagacccccatctccacaaaaaattaaaaaattagccagttgtggtgctgcatgcctggggtcccagctacttgggaggctgaggcaggaggatcatttgaacccaggatgtcgaggctgaagtgagctatgacggtgtcactatgctccagtctgggtaacataatgagaccttatttttaaaagaacacacaatgagtagctgagtagggctgcggctcactgccactgccagtgtttgaagaacagttcccactgaatgcatctcaattttgcactgtaatcaagtagaaaaactgtaagtccaatcattgtaagtctgggaccatcttgtccatagtcttatgacagaatactgtttaaaagtgtagatctatccgaatgttgatgaatttattgtgaaatgcttccccttgtgttgcttctatgtgatctatgtgcagcagtggacattttttttttaagtgaaaaacaaatcatgcccctcccttcattctctcccccgtgatgtttcccttagagaacattcctcccttcccttcccagtccccacctcagagatggggcaactcctccctttttatcacacttcttccactctgaggctctaggcaatcagttctcggtcactcccacccatgtgaaggtttttttttttttttttttttttgagttggagtctcgctctgtcgcctaggctggagtgcagtggtgcaatctcggctcactgcaagctccgcctcccgggttcacgccattctcctgcctcagcctcccgagtagctaggactacaggcacctgccaccacgcctggctaatttttttgtatttttagtagagatggggtttcaccatgttagccaggatggtctcgatctcctgacctcgtgatccgcctgccttggcctcccaaagtgctgggattataggcgtgagccatcgcgcctggccccgtatgaaggtttttgatgatgcttgctagaatggacccagataattttcgtgtggacagaaggtagatttttagtagctcttgttagaggtcatgtaggagattgtctcagcttgagctgctattgcaaataccgatactgtagactgggtggcttgaaaacaccagaaatgcattcctcagagttgtggaggctggatgtccaagataggacaggtctgagatcagggtgccagcatgcttcagttctggtaggaatcctcttccaggctacagactgccaacttctcgtgtcttcgtgtggcagaaaaagggctaaaaagatctctgggattttttttttttttttttgagacagagtctcactctgttgcccaggctggagtgtagtggtgtgagtggcatgatcttggtatactgcagtctccacctcccgggttcaggcaattttcgtgtctcagcctcccgagtagctgggactataggcgtgtgtgaccatgcccgactaattttggtatttttagtagagactgggtttcaccatgtttgccaggctggtcttgaactcttggcctgaagtcatgtgtctgccttggcctcccaaagtgctggggttgcaggcacgagccaccgtgcccagcagggcctcttttgtaaaggcactaatcccattcgtgaggttctgccctcatgacctaattacctcctacaggtcccatgtctgagcaccatcacactggcatttaggatttcagcttatgaattttgggaggacacaaacattcagttcataacagcattgtgttgtcacccacttttttttttttggtaggaacagtgtgtcgaactctggtctcaagtgatcctgctgcgtcagcctcccaaagctttgggattacaggcacgcactgccaaggccagccacatccatattcttaatctccaccatggcctcatgagcctggtcccctgtcagtgggctagggcctcgacatgggtaatacgcatattagctgaggttcaggaacccaactgacttgtgtaagaatttccagctggccccgcagaacaagaggctaaagagtggggagcagtgctagtgttgccactgctacagctctcgggcagtattcactaccctcatcctgtatgtgtgcccaggtgctgggtgagcatttcactccacacgagaggcatcatgcattccttcattcgttcgttcatgccgttatactatagtgaacaataaactcttgaggaatgtcgggtttaggggagccagtcccctgttcagttgaaaatctgcctggctatgtataaattttgactcccccaaaacttaactactaatagcctgctgttgactcgaagccttactgatgatatcaacagtcaattaacacatactttgaattttatacgtattatgtactgtatgcatttttttttctttgagatggagtctcactttgtggccctggttggagtgcagtggcaccatctctgctcactgcaacctcccagatttaagtgattctcctgcctcagcctcccaagtagctgggattacaggcatgtgccaccaagcctggttaatttttgtatttttagtagagatggggtttcaccatgttggccaggctagtctcaaactcctgacctcaagtgatccacctgcttcggcctcccaaagtgctgggattacaggcgtgagccactgcacccttcctgtactgtattcttataataaagtaagctagagaaaagaaaacgttattaagataatcttaaggaagataaaatctatttactattcattaggtagaaacagatggattatcctacaggaggaggaggaagaggagggggttggttttacagtctcaggggcgaaagaggcataagaaaatctgcaaataagtggacccacgaagttcaaattcctgttgttcacagttagtggtacacaggagacactaggtaagctaaaggttgggctgggcatggtggctcacacctgtaatctcagcactgtgggaggtcaaggcgggaggatcgcttgaggccaggagtttgagaccagcctggccaacatggtgaaatgctgtctctactaaaaatacaaaaagtagctgggcattgtggcatgtgcctgtaatcccagctacttgggaggctgaggcacaagaatcacttgaacctggaaggcagaggttgcagtgagccaaaatagtgccacttcactccagcctgggtgacagagtgagactgtctcaaaaaaaaacaaacaaaccaaaaagattagctaaaggttgaactttcagtgatgaactaaacagaaacaatctcatagagattgtggacaggagaagaaacaagcacaggtgcagttaaaacccgtgataaatgccccggcagaaacaagtgttaggccaggcgtgatggctcatgtctgtaatcccaacactgtgggaggccaagacaggaggactgcttgaggccgggggtttcaagcctgcagtgagctatgattacaccactgctctcctgcctgggcggtagagaccctgcttaaggaaaaaaaaaagaaaggctgggcgccgtggctcacgcctgtaatcccagcactttgggaggccgaggtgggcggattacgaggtcaggagatcgagacgatcctggctaacacagtgaaaccccgtctctactaaaaatacaaaaaaaattagcagggcgcggtggcaggcgcctgtagtcccagctactcgggaggctgaagcaggagaatggcgtgaacttgggaggtggagcttgcagtgagctgagattgcgccactgcactccagcctcggcgacagagcaagactctgtctcaaaaaacgaacaaacaaaaaaacaaaacaaaacaaaacaaaaacctaaaccaaaaccaaaacgcagcatagtccatgagagaggaagagcagggcaggcctactcacctggggctgtcggggaggctgcccaggaagggactctgaagtgagcacctggaggaaggaggttagttctgagggactggaattcatcctggcattgggatcacgggcaaaggtcctgtggtgacaaggagactggtgcgagcctggcttagcaccatgtgagagcagaggggtggaaaggcactaggtaagcatgccttcggatgtgaaatgagggagacggggactgggggaccctgacatgagggaggaggaaaggagatgggaagaatgggtgaccagagggaccactagaccaccgagggtgagagcttgctaatatcagagccatgtgtaggagaatgaagtgcaatcttggatagacctccagtgcaggtggtccagccatcaatgaccataaccacatgcatgattgtaggtggaaccagaagaaccacccaggcaactcacagaactggggaactaatcaagtcttgttttaaatgactacattacgggtggtttgccacgtagcagtggatcgctgaaacagtttaaaatatctattcagccgggcgtgcggtgggtagctcacacctgtaatcccagcattttaggaagctgaggcaggaggatctctcgaacgcaggaatttgagaccagccttgagcaaaatggcaagaccctgtctccacaaaaagtaaaaaaaattagctgggtgtggtagcatgtgcttgtagtcccagctacttgggaggctgggacaggagaattgtttgagcccaggagttcggaggctgcagtgagctgtgactgcaccgctacactccagcctggacaacagagtgaaaccttgtctctaaaaaaaaaaaaaaaatctacaaaccaggcaggagcactgaatagctcctgtctcccctgagacccttgtagaccttgaggtctgttacagagctcaccaaccttctcttggtctagaattatctaaaaagagttgagtgcagccagaaaggactgaatacatggtgttcttcaatcccatcaaactgctgtgccctgcagatgatccctgagtccaggtgttggtgggttgaggacaaggctgagggaacagaggtgggaacagtggcccaggaccaggagaatgcagagttcagagtgcatgacctgcatctaactctagatgctccaggggtctgagaccatctccagcagggtctggaaggcccagtcattccccagcacgcacagtcaccactggatactatcttgctctgtgagtgatgcaaaggtcctgggtcagtgaagcctgtgaaacaaagttgggaccagagtgtctctacggttgagggctgggcttatttgctctctaagtataattgtaagagcaaatagaaacacctatcctctctgagcttaaaaggatcaaaaagctctgacagtgtcagtggtagggctagttcaggggctgcagtagtgctggtgcccacaggtggaaccttctcctgccctgattcccaaggactggtgctctcggaggggtctgggaggtatatttctctttcacaaatacgtgcacaacacatgaatgagctactggatgagggaataaatgaatgaatgagtgaaaaaagcttcctttctcctctccaggagttagcaatcactggttagttccccactgcccaccagcctgtgcagaggagggaggagcaacaggtcatagatgtggttgcagctgttactggacagagtggtcaagacatcctgtgtctgcagaggccctccccagccctcacctggacagtggagctgttggccagagaggcagtgggaagaagggtggggctcccagagtcgacccagcgggctgaaactggtgcagtctgcgcctcaccaggcagagaatggatgtggggcagcttgacaccgagcaggggctcatctgagcctcaggggtggttgctctatcaaagtgtttgcaagtaaacagtcccagtgcacacccagctgctcagtgccacctcgtgcacccagggccacttcagccttgatcacaggcctgcacaggttccaggggaggagacactccagctttttgagggagggtgagcatgtgggatcagagactttaagtccaaatttccccttaatttttttttaaatcttgcaggtagtatgcaaacatacatttaatgtattatttttattctcatttatttttttgaggcagggtctccctctgttggccaggctggagggcagtggcgagatcttggcttgctgcagcctcaactcaacctcccaagctcaagtgattttcccacctcagcctcccaagtagttgggactgcaggtgcctgtccgccatgaccagctaatttttaaattttttttgtagagatggggttttgccatgttgctcaggctagactcgaactcctgagctcaagtgatcctcccaccttggcctcccaaagtgctgggattataggtgtgagacactgcatccggctcccaaatttcccctttttataaggacaccagttgtactgaccggggccccacctctatgacctcatctaaccttcattaactccttaaaggccctatctccaaatacaggcacactgggggttagggcttcaacctatggatttgggggatgcaattcagtctatcacagtgccaagctgcacctgctcggtgagccagaacaggggtggggaaggcaccaggccctggtgcttctttcccatgcctgagtcactctacttggttctaggagggagaggagcatgggctgaaggcagtgctgcaacatggaaggggcagaacatcccaacccgctctgggcccccagtgtcttctgctgtacaaagcaggtgttttcaccccccgaggatgtgtcctcccttcctggctcaccaagcatttaaatgtagacagaaaatttatttatctggggtgcggtttcctcagggggaagttgaggtcacgacccctgaggtaccttaacccaaaggcctccagggcactggccccagagtctccagcaggtgcttcctccctgaatgcttccatatggcaagatcagagccacaaatgctgccccgacactgttccggtaaccgacgttgcagacccaagaaagtctgggatggtagtggccaggaacggggtgtgccacggccccacctctcagagcagggaggaggatgctgggccagcccttggggaccccaggcaccgtggccacaggagtcagagctctgcatgtctgcaccatgtcctgggctcctgtcctgctcatgctgtttgtctactgcacaggtgagggaacccccagatcccaaagactcctgccccttccttcatcctgccctgcccccacggcccacatgcatctgtgtcaccaggttgtggtcctcagccggtgctgcatcagccgccggccatgtcctcggcccttggaaccacaatccgcctcacctgcaccctgaggaacgaccatgacatcggtgtgtacagcgtctactggtaccagcagaggccgggccaccctcccaggttcctgctgagatatttctcacaatcagacaagagccagggcccccaggtcccccctcgcttctctggatccaaagatgtggccaggaacagggggtatttgagcatctctgagctgcagcctgaggacgaggctatgtattactgtgctatgggggcccgcagctcggagaaggaggagagggagagggagtgggaggaagaaatggaacccactgcagccaggacacgtgtcccttgaactgaagacagcagaggcacgcatccccttggagagactgtcatggaagagggtggagccgccgcccgaagcgccgaggaggctgagccactcagcatctcctggtcctgcagtgttgctgtaaatccccattggagactgcattagggaattaaagctgcttgtcactttttgctgagtttggtctgactgttgtgcgacttcgtagtaccagccttgggcaaaggcccggggccccgggagactggcagatcactgtggtgagcactcacctgagtccttacttttgtgggccatgggaggcaaggggttgaccgaagcaccctggaggggcatccatgcccaggacaggaccctctggtgtcatctgattctgcccagcggttacagggcaaacaagcttagaaagcacctggtctgggcctccagggagaacaggagccaggtaataggcctagagtgggttctccaccttggtcctatcgacgttttgggctggacagttcttggttgtggggctgtcctgcggattgttgaatggtgagtggttatctgtggcctctacccaccagatgccccttcccagttgtgacaaacaaaaatgtctccagacattgccaaatgtccccaggtggtaaactcacactgattgtgaaccactggtctagatgagcaagtaaatgcatttacttatttgtacaagagagtggcaggtgtcggcaaacatgttctttttttcctttttttagggataaagtcttgctctgtggtccaggctggagtgcagtggtgcaatcatagctcaccgcagcttcaaactcccaggctcaagtgattgtcctgtctcagcctcctgagcagctgagactacaggcgtgcatcaccatgcttggctatttatttagttttatttttggagagatgaatgtctcactatgttgctcaagctgatctcaaactcctgagctcgagtgatccccctgcttgggcctcctaaagtgctgggattagaggcgtgagccactgcacccagcccattttctataaagagccaggtggtaaatatttttggctttgtgggctatgcgatctctgtcacaactgttcaattctgtcctagtagcaagaaagcagccacagacaaacatgtcaacaaagaggcgtggctgtgttcttataaagctgtatttacagaaacagatggggctacactgggctgggtatggcgcccaggctgtagtttgctgagccctgctcgggagcactccagctcctgtctccaggttttaagcaagccatgcttggtgggataatcagagtcccccctcaacttatcttgcctgtgaccccaggcagaagcctctggacccatggagatacctagaggcatgaaggacgtggtctcactgagactgtgttggactgtctgggtgaagtagcaatggggagctccctgcagccccggcccacagcaaggccccctgagcccgtgggtggtgggtctgagtgtgccttgcagagagggactctctacactgggtgtccacacaacctgtagacatgcctcactcagagaggtgccgggcaaaccatctcccttgtaaccccaacttgcctgggaacgtgcattcaccccagctaaaaagatcctgaggcatctccccagagaggtggacacatgtcagtatcagcgttccatgtgtggtcatgagtccctctcttgttaaacagtggtctccagcactttgggaggccgaggcgggtggatcacctgaggtcaggagttagagaccagcctacccaacatggtgaaatctcatctctactaaaaatacaaaaattagctgggtgtgttggcacatgcccgtaatcccagctacttgggaggctgaggcaggagaattgcttgaacccaggaggcagaggttgcagtgagccgagatcatgccactgcactccagcctgggtgacagagcgagactccatctcacaaaaaaaaaaaaaaaaaaaaaagagacagtgatctcagcttatgccatactctatgcactgggttcttcctgcgtcaggcttttacccctgggccaggcccacattttaaaacattattatttacttgtttattattttattttagagataggatcttgctatgctgcccaggctggactgctgtggctattcacaggttcaattcatgatgctctacagccttgaactcctgggctccagcgatcctcctgtctcagcctgctgagtggctgaactacacgtgtgagtcactgcacctggccatggcccacagttttaaagaccagctagatggttccagaggaactctgtcttctgcttgtaacccgtccctctcttgcctccatccttcatgattctgggattccatgctatgagaagagatctagaaagccgggagctgagttggactcctgtatcatcctcatgcccccaccccaccagctcaatggaaaatgagacctggaactcaggcttgaggccagactgagtgtgagtcttagctctggaggagtcacttaaaatctaagccaacatttccaatgttgcatgtaaaggggataatcatagaactgattaacttatataaaaagtttttatctggccaggcgtggtggctcatgcctgtaatcccagcactttgggaggccgaggcgggcagatcacctaaggtcaggagtttgaggccatcctgggcaacatggtgaaaccccgtctctaccaaaaatacaaaaattagctgggcatggtggcgggtgcctctgatcccagctacttgggaggctaaggcagaagaattgcttgaacctgggaggcggaggttgtagtgaaccgaaatcgcaccacatcactccagcctgggtgacagagcaagactgtctctcaaaaacaaacaaacaaacaaacaaaaaggttttatccatcatgagtgctcaacaaaataatagtatcatgatttccccatcagtcacctgcctggccttccctgttgtcaaatcctttcctttagtctgagtcatttctcaccttgaccattatctggtctccttcccatccatcctcctgctgcatgcagtctatacccaccactcctcatctttgttgctcctagatccagccttgcatgcattcctcctctctaaccctttattgtctcccacactctaaagaacatatgcaagccacatctgtaatttccaattttctagtggctacattatttttaaacagtaaaaacaaatagatgaaatgattttttaatgatatattctatttaacataataaatccccaatattaccaattcaacctataatcaatataaaaattagttactagatagtttaaacttgtttttcttttgtattcacacttcaaaatctggtatgtattttatattcatgtcttggataatttgctcaagtggataatctggtcagccaagtggtcaagagctacatatgccttgtgaagagaccactttggttgaggggatgcaattcagcctccttcccatgacacagcctttgaaggctggctcaggcttggtcccaagtcccatttcttgtgcaccctctctccctgtttctgccatgttaagccaactgcaactgatcaaacacccgagtctcttggttgcttctaaacctttgcccaagctgtttactgccaggacttcctgtccctttgttgtggcctccatctggctgcactgactcggggctccacaactgtctcaaatctcactccttgggcaagacttccccgagctcttcatgcagttattaacttcctccactgtgcaaacagcatgttttcctaactatatttagcttctactgcacagttataaatttatttagcaaagctccctcccctactaatctgcagattctcagtgggcaggatctactcaacccattgatgtgcctgataaacacttggcaattagacagttgaatgaacaaatgaatgaatgtgtaactgaatgaattttcgggttccaaggaccctgacattctgggatcccattaggtggctggggtcaccaccttagagaattgtgattccctaagaagggagaaccagcccagaccttctcgatcatattagtgactggccacatttcctctcctttctgattctctctctcccccacacccttactgcatgacagtgatgagaaaatccacttgatcaaccaaactacaactttcggcctcatccctatccctcccttgccttctgaccagggccacagtcaccctgtgggttcttccttttgagtgtctctcactcccttcctcctccatatctctgagaccagcctccagccctgctggcctgctctgctgccttctggctctttgttgaacccaagaccagggtttatatatgttaaatataaatatatttttccatatgaaatgtaaacatattttaaacattaaatataaatatacatcttagatatggcctgtgttggaatgtgtaatagattgagtatataatgtctattcaatataaaatttatatttatatatgcagtaatgattcaggttgattgtagttaagaaaaacaagctccaaattcgagagaaatatgtaagaagagagacaggaagaaaaaataatgaggcaggtaaatgcaacagacaattcgagacccacaagtgcagagcaggcttcccagacccggataatgtctcctgggctgataggaagccctcaaccccccaagtccttctcagccataaaccgcctgagcacagagccacagggaccgtgttggggctgggcctctcgactttagttcctctcattctgtgcaaaaggaaaaacaattcagaatctacagaggtttagatgtgtgtagatgtggacagagaagtcctggcacggtggttcactgcccaagaagacagtgagtccctggagggatagaagaatatacatcatgctaatatatgtcatcccagtactttgggaggccgaggcgggtggatcacttgaggtcaagagttcgagaccagcctggccaacatggtgaatccccgtctctactaaaaatacagaaattagttggctgtgggggtcgatgcctgtgatcccagatactcgggagacagaggcaggacgaactgcttgaacctgggaggaggaggttgcagtgagctgagatcatgccattgtactccagcctgggggacagagcaagatcccatctcaaagaaaaaagaaaaagaagttgtgagtgctaagttctctctggattttcaggaggccagttctccagtccacagtggcctgggaggacaggggttcctgagggtgaacagagcctgtgcccggtcaggtaggatcgcatgtccctgaggttcagaacccaggagcatggggagggtccagggggttcctgctgcatggagggaagaccctctttccacaggggccccggagagcgagaggaaggaggagggcaggtcagtgagtgtgacggggtcacagtggagagggaagcagaaagaagtgtccccacaacaagacacacacagtgtctacgctgaagctacagagagggcctctccacctgtgtctgccgcaaagcagtggggcgtcttctggcagcccagagtcacctccagatcccacctgcaccatgcttcctgcagggactgcctgtcttcctaatacactgtcttctgaccagagtcttccagacaaatcactggttgctatatatatatatatatatatttttaatagctaatatcttacactgatatatttatattatatataaatatttttgtactttatgtttaggctatattacagatgtagttagttagctatttatgttatatataatataaacatgatgtagattcttatatttctctggggactcactgtcttcttaatacactgtcttctgaccaaattcttccagacaaatcagctgttgctatatatatatatatatgtgctatatatatatgtgctatatatatatgtgctatatattttattgcatagaatatattatatattaattatataatatacattatacattacatattatatataatatattatattattatgctatatcttatatattatatatgttatatatgtatatatattatatatacacatacatacactcatgtatattttaatagctaatatcttacactggtatatttatattacatatgtttatatacaaatatttttgtactttatgtttatgctatatatacagatgtaattagttgtttatgttatatgtaatataaacatgatgtatattcttattttcctgtgaggacccactgtcttcttaatacactgtcttctgaccaatgtcttccacacaaatcagctgttactatatatatatataatatttatatacacatatacacatacatacacacatatgtatattttaatagctaatatcttacactgatatatttatattacatatagttatatactaatatttttgtactttatgtttatactatatatacagatgtcgttaggtatttatgttatatataatatattaacatgatgtatattcttatattcttctggggactcactgtcttcttaatacactgtcttctgaccagaatattccagacaaatcactggttgctatatatatatttttaatagctaatatcttacactgatgtatttatattacatatagttatatacaaatatttttgtacttttgtttatactatatatacagatgtagttagctatttatgttatatataatatatcaacatgatgtatattcttatattcctctggggactcacagtcttcttaatacactgtcttctgaccaaactcttccagacaaatcagctgttgcaatatatatatatatatatatatttattttttaatagctagtatcttacactgtggctcatgcctgtaatcccagcactttgggagaccaaggcaggtggatcacctgaggtcaggagtttgagaccatcctggctaacacagtgaaactgcatctctactaaaaatacaaaaattgattgggtgtggtggtgcatgcctgtaatcccagctactcgggaggctgaggcaggagaatcgcttgaacccaggaggcagacgttgcagtgagccaagatcgtgtcgctgcactccagcctgggcaacagagtgagactccatctcacacacacaaaacatcttacactgatgtatttacattacgtgtagctgtatataaatatttttgtacttacattctgtgtacttatattctatatattataaaacattatataaaattatacatgtataataaaatgttacataaaaattttaatataataccattttactacatatatttctaaatttaatataatgaaattttatatataataatgtataacatttctaaacttattataatacaatgatatataattattttctcatattataattatacataaggtaatttattgtaaataaaattttatataatctacgtttattataataaaattttattacatataacacatttctaaatttaatacaataaaatactatgtataataatttataacatttcaaaatttattatataattttattatacaattattttatacataattatatatagtatataattgtatttatagaaatataattatgcatatacaatatgtaattttatttttacatagtatatatacataattatgtattaacaaatataataatatcaatttatatacttatttacattaagttatatattatataaatgatgttatatgttatatgttacatatatttttgcttaatatattaaatttaatctataaaattatgtattacaaataaaagtgtattttacatatacactacatataactttatttatataaaaatataaaagtcatatggttaagttaataaaatatatttatatcaatctattcatataaaatatacacaatgcatatttatataaatacaaagtatataaaacttttaccagtaggatgcaaagagttgctgaccgtctgcagaaatcctgaacctctggaagcagaataaaatcttacctcccagtctgctttgaaaggaacagtaaagcagtcccgaaccccaaacccatcctaaggggagatgggggagttgggatggacgcgttgaccagtgaggactttcctttgctggttttgaggtgtcttagcccagaagctaagacgggaagtgattctggagcaggtgagctgatcacaagcctgagccaagaatccatggagctcataaatagcagaagccgggaccctgtgcaaatccttctgaaatatcccccgtttactgggctcctaggggtggggaagaaaaattccctgacatttcggcctcagggaaagagagagagaccccactggccggaagcctctgctatttttcagaagacagctggggcatcactctttcccaaatgacggtgattttcagagtggttcactttttggagagacatttctgccctggagatccatacatattgaacccaaacgaatattttttaattaaaaaaaattaaacattagaaagttcaatattgaggcagctacgagtttgaattcctcatttttcctagatgcatgttgtcaaaatctgtattgcatttagtaactacttatgtgtctaatgtatataaggttacacaatgtttttttctgctcctcagggtcagaatttgaaataaaagttttggaaagaaaaaacactcttgtctgtttgtgcaaaaataaaagaacccatattttaagaatattttaaaataaatacaaattttgtgtgggagggttgcttataagaattcttcatatcctaaatcaaagacagatcttgttattaaccagaaaacaaaatgtgtgtgtataaatgtacaacactcttacactcacacaaacacaggcacacacacacattcacgcactcactgatgtactcacacaaacacaggcattcatgtataaatacacacataagcgtgtatttatagaaatataattacacacatacaatatataattttatttttacatagtatatacacatcattatgtattaacaaatataataagatcaattttattatatacttatttacataaagttatatattatataaatgatgttatatggcatgtatatatcacatataactttgcttagtatataaaatttaatctataaaattatgtattacaaataaaagtatattttacatataaactatatataactttatttatatgaactataaaaatcatatgtttataataaaatatatttatttatatcaatatattaatataaagtatacacaatgtatatttatacaaaaatttttaattaaaaaatattcatttgggttcaatatgtatggatcgccagggcagaaacgtctcttcaaaaggtgagccgttctcaaaatcaccgtcacttgggaaagagtgatgccccacctgttttctgagaaacagcagaggccagtggggtgtctctctctttctctgaggccgaaatgtcagggaatttttcttccccaccactaggagctctgtaaaccggggatatttcagaaggatttgcacagggtcccggcttctgttgtaaatgagctccatggattctcggctcaggcttgtgatcagctcacctgctccagaatcactgacacaaatgcaaccacacacttacacaaacacacatcaacaccaagacagacagaagcacaaaacacactcatagaaacacatggacacacaaagacatgcacactcacacaaacgcagggacacacacacaaacacaattacaaaaatgtggggtttttttgcacacgtgggtgcacatgcacattgacatgctcacaaagcacacaaacacgtatacatacaaagacactcataaacagaatcatgaaaacactctcatataaacacgtggatggctactcacccacatagacactcacatatgtcacacgcactcatacacacactcagaatcacacaagcacacacaaacacacaaatacagtcacacactcatgcaaacacagtcacaaaaagactcacataatcatgtggacacacaaacataaaaattcacacactggggccgggcaaggtggctcacgcctgtactcccagaactttgggaggccgaggcgggcagataacttgaggtcgggagttccagaccagcctggccaacatggtgaaaccccgtctctactcaaaaatacaaaaattagccagatgtggtggcgtatacctgtaatcccagctactcaggaggctgaggcaggagaatcatttgaacccgggaggcagaggttgcagtgagccaagatcacgccactgcactccagcctgggcgacagagcgagactccgtatcaaaaaagaaaaattagccagatgtggtggtgggtgcctgtaatcccagttactcaggaggctgaggcagaagaatcttttgaacctgggaggcggaggttgctttgagctgagattgtgcctttgcactccagtatgggtgacagagcgagactccatctcaaaaaaacaaaaaaaaagaatttatacattgccatacagattcacagacatacactcatattcacaaacacacaaatacgataaacgcaggggcacacacaaacaccatcacaaaaacacacttccataaaacacaggaatgcacgctcacacagaaacacgcatggaaacacacgttatcttacagattcacagacacactcatcatcacataaacaggcacacacacacagccacacaagcacacacccacacccacatcaacacacacactcccacacggcacccacgcgctcacgcacataggtagaacaggcctgcattacctgataacgcagttagatcagacgtgatgctgcctgccgaggagacctggaggcttcccatgaatgggctttcggatgagaggtctctgggtgcatttggtgacaccccaggcagtgggggagacgtccaggctggaaggccagccacagccagctctgcccaaggatgccacgtccatttgcttcagtaggatatgcaccctggaaacccaggttcctgcctctccaggaaaccccactgaggtcagcacatcccccaaggtttagaaggggtctctgggtgcatttggtgacaccccaggcagtgggggggacatccagcctggaaggccagccacagccagctctgcccatggatgccacgtccagttgcttcagtaggatctgcatcctgtaaaccctggttcctgcctctccaggacacgccattaaggtaagcacactccccaggtttagaaggggtctctcggtgaaatgtggtgacaccccaggcagaaggggggacgccacagccagttctgcccacggatgtcacgtccatttgcttcagtaggatctgcaccttggaaacccaggttcctgcctctccaggacaccccactgacgttaacacaccctccaggtttacaagcggtctctgggtacatttggtgacaccgcaggcagaggggggacgccacagccagctctgcccgcggatgccgcgtccatttgcttcagtaggatctgcaccctgtaaaccctggttcctccctctctaggacaccccactgaggtcagcagcccccaccccccacccccaggtttgtccagcttcgctgtctggggagagacacagaaagaccacattcggtggaattctggctataaccttttgtagccggcaagaaggatcaccaagctgtcccgttaccttgctggagcgatcactggtttcacgcttggcccccgtgcagttagtgcctgggccaggctcgattcctggagctcaggtgaaatttgggcttggagctcacgcctgcaccatccagaaagcagaaggcagccggcccgggctgtacggttcgtagaatcagagagaacactgcttgccttcatgtctgtaccacaataaatctgccaactgcggtcaaagtctctggattcctgccccctcattttattttgtctattacggagtggaaggagtgagaaagattttgcttcctattttgttttgcaaagcgcttctaagaaaaacaacccgtgttctgaaaacgagattctgagtgtcccctgggcgcgatgaaaacaaactttgggaatccaagggcctgagaggcagagtgaatgtcatttgcatttccctgcgaatgacaaagtcactttttatttattattattattatagattcaggggatccacgggcagctttgtgacctggggatattgtatgatgctgaggtttggggtatgaatcatcccgtcacccaggcactgagcattgtacattcctgaggtatataatgtgtactaaaaataaaatgtatatttatatatgcactaatgattcaacttgattcctcgtaattaagaaaaacaaaccccaaattctagaggagttctagaaatatataagaagagggccaggcgcagtggctcatgcctgtaatcctagcactttgggaggccgaggcagacagatcacctgaggtcaggagttcgagaccagcctggccaacatggtgaaaccccgtctctgctaaaaatacaaaaattagccaggcgtggtggcaagtgcctgtagtcccagctacttgggaggctgaggtagaagaattgcttgaatccaggaggcagaagttgcagggagccgagactgcaccactgcactccagcctgggtcacagagcgagactccatctcaaaaaaaaaaaaaaaaaaaaaaaaaaaaaaaaaaaaagagagagagagaaaacaaacaagcaagaaaatgcaacagaaaaatccgtgacccaaagctctctccagttgctgctttctgccggaaattcaaagaacctcagggtagtttttcaacccttgtacccccgcccctgcttcctgctctattagtcctgagggtctgtggtgccgctccatcatgtccaggtgcaggcaatgtttagctcccacctataagcgagaacatgtggtatttgattttctgttcctggcattaattcactaagcatagtgccctttggcttcatccatgttgatgcaaagggcatgattttattcttgttcatggctctgtagtattccatgatgcggaaggaccacatttgttttatctaattgagaacatgtggtatttgattttctgtttctggcattaattctctaaacataatgcccttcggcttcatccatgttgatgcaaagggcgtgattttattcttgttcatggctgtgtagtattccatgatgtggaaggaccacattttctttatctagtggagaacatgcggtatttgattttctgttcctcgtattgattcactaagcataatgccctctggctgcatccatgtggctgcaaagacatgattttatttttttcatcactgtgtagtattccgtggtgtaggagggccacatttgctttatccagttgagaacatgtagtatttcattttctgttcctggcattaattcactacgcataatgtccttcagctgcatccatgtggctgcaaaggacatgatattattctttttcatggctgtgtagtattccatgatgcagaaagaccacatttgctttatctagtggagaacatgtggtattcgattttcttttcctggcgttaattcactaagcataattcccttcagctgtgtccatgtggctgcaaagatgtgattttattctttttcatggctgtgcagtattccatggcatagaagggccacaattgctttatccagtcaagaacatgtggtatttgattttctgttcttgtgttaattcattaagcataatgccctccagctacatccatgtggctgcaaaggacatgattttattctttttcatggctgtgtagtattcgatgctgtagaagaaccacttttgctttatccggtaccccactgatgggcaactaggttgattccatgactttcctattgtaagtcgtgctgtgatgaaccttacagggctgggcactgtaatcccagcactctggagggccgaggtgggcagatcacctgaggtcaggagttcgagaccagcctggtcaacatggtgaaaccccatctctactaaaaatacaaaaattagccaggcatggtggcgcatgcctgtaatcccagctgctcaggaggctgaggcaggagaatcacttgaaccaggaggcggaggttgcagtgagccgagattgcgactgcactccagcatgggcaatagagcgagactccgtctcaaaaaacaaaaacaaacaaacaaaaaaaaaaaggaagtttaccatgcatgtgtctttttggtagaatgacttcttttcctttgggtagatgcccagtcttggaattgctggcgcaaatggtggagcagtttagattcaggaggtacatgtacaggtttcttacatgggtacgatgtgtgatgctgaggtctggggtatgagtgatcccatcacccaagtagtgagcataataccccacagttggttttttcaactcttgtccttctaccttcctctctccccctaactagaccccagtatctcttcccttctctgtgtctacgtatacacaacatttagctcccacttataagtgagaacacgcagcattctgttaatttacttaagataatggcctccacactgttcacaatagcaaagatgtggaaccaacccaaatgctcatcagtgatagattggataaagaaaatgtagcacatagacactgtggaatactatgcagccatgaaaaaggatgagttcatgtcctttgcagggacatggatgaagctggaaaccctcatgttcagcaaagtgacacaggaacagaaaaccaaacactgcatgttctcactcataagtgggaagtgaacaatgagaacacatcgacccagagaggggaacatcacacactggggcctgttgcaggagggggggactggaggagggacagcattatgagaaatatctaatgtagatgatgggttgataggtgcagcaaaccgctatggcacatgtatatctatgtaacaaccctgcatgttctgcacatataccccagaacttaaagtagaatagaaaaaataaaaaataataaaaataattaaaaaagataatggcctccagctacatccgtgttgctgaaaaaaaaaaacaccaaaaacatgattttgttccttttcagggttgtgtagtattccatggtgtagatgtacggcattttctcgagggtggagggtgggaggagggagaagatcagcaaaaacaacctgtggctgggtgtggcagctcacacctgtattctcagcactttgggaggctgaggtgggtggatcacctgaggtcaggagtttgagatcagcctggccaacatggcaaaactctatctctactaaaagtacaaaaattagacaggcacggtggtgcacgcctgtaatcctggctcctctgtaggttgaggcaggaaaatctcttgaacccaagaggcggacattgcagtgagccgagatcatgccactgccctccagcctgggccacagagtgggactccatctcaaaaaataatcataaaaataataataataacctgctaggcttaggacctaggttgattccattacaaaaaaaaaagaaaaaagaaaaaactaactttttaaaagaaggatctccctgttcaaaaacaaaaccaatgccctgtcaggaaagatgttctgtgtttctggtaaagctggaaggaacctacaggaaggagtcaccccataaaactagtggagcagcattgccttttggggtgagggctgcttctgttaggccaccaggatgagtaccttcctggggagtgtggttcatcctataccatccaggaagcaattcctgcccccaaatcacccgccagcttctgccctgtaagtaaaatccccagcaagcgggcagcaaggagctacttgccttggaaggcagccgaagtctctgtccaccacccagactgtgtcctctgggcaaggccagggcttccaattggatggttttcacattagcggctgctgtttagaatcatcaacattggccaggcgcggtggctcacgcctgtcatctcagcactttgggaagctgaggcgggcggatcacaaggtcagggaccagcctggccaacatggtgaaaccctgtctcaactaaaaaaaaaatacaaaaattagcttggtgtggctgggcatggtggctcatccctgtaatcccagcactttgggaggccgaggcgggcggatcatgaggtcaggagatcaacaccatcctggctaacacggtgaaaccccgtctctactaaaaatacaaaaaattagccaggcacggtggcaggcacctgcagtcccagctactcgtgaggctgaggcaggagaatggcgtgaacctgagaggcagggtttgcagtgagcccagattgcaccactgcactccagcctgggtgatatagagtgagactctgtctcaaaaaaaataaaaaaataaaaaattagcctggtgtggtggtcggcacctgtaatcccagctactcaggaggctgaggcaggagaattgcttggaccccggaggcagaggttgcagtgagccgagatcgcgccattgcactccagcctagacaacagagcaagactctgttgcaaaaaaaaaaaaaaaaaaaaagaatcatcaacattgccttggcccaatctcttgtcaaatatttaccactggacctccatgttctagtttcaaagctctgctggccacagtggctcatgtctgtaatcccagcactttgggaggctgaggtaggaggactgcttgaacccaggagcatgaatccatcctaggcaacatagtgataatagtgtcaaatcagagccagtgtctggtaattccccaaatatctgagaattttcttttctttaagtcatagtcatcctggcagaaggctgtaggtccctttggggaagactgggaaaaagataaacaatgtaaatttttggcaatgtagcagcgtacttccccaagatcacccagcctccccttcacttaaggggttgtgggcctgtgaactggctcaagtctgggaattgattgagggttttagatctgtgtttcattaatttgagttagtcttttattcagttgacctagaattcttcattttttaaagaacaactaagactttggtacagcccattagctctccctgtggataccatggattacacaatgccgtgggtgtctgtgagtcaaaccattctgactgctgctttgacactgctttccactgtggtgaccacacccaccttatcttcggtgattaaggacagcccatgttccctgccaccctaggattcaattatcctcattttacttaaagatcccagtccagtggctgcagttcctgctgtaacattttgcctactgagagcacaagctcaaagctcttccaggatactgggctcctctcacaatattctttctcatgatcgtcgtgaggagtatgttctgtagaccctccagtgtgagtgagcaggtctgacataataaatccagtctccgtgagtttttgcatacctttctgtacacataaaccaaggaagttgtggcatctcaactttatgtaccttaggtaaactctgattctgtttcagccaaccaaccaagtcaccaaacaaataagcaaacagccaaccaatcaaccaacaagcaagcaacaaaccaaccaaacaaccaagcaaggaagcaagcaccaagcaagcaagcaaccaaccaaccaagtaaccgatcaaaccaacccttggagccctttctaaagctttgacttacaaccctgagtccagaatctctgtttagtgggccaacattaataaatgtagccgaatccaactttatgttacttccaccatggtgccactcacttaatatccattcccacgtatattctccagatttccttctgtataaattgcgtgtgtgtgtgtgcgggtgtatgtgtgtagaaagagagcatcaactgaaaaatcacaaaattttataaatttagaaaagagagctttatttcttataaaggtttgcagtccgcaaggtggccattatgacaggctgggaagtgtggcctacagccaaggccagaggcaggcatttccagggagggaaggagaggacaggaatttgagccaaatgagttggctacatatacatactcaataggatatcagaggagctacatcattttatgagaatactcataaaagaggtcctaacgcatgcatattcaataaacatgcatgttcattctggggtggagacttgacatttaaatgtattataattaggccctacacatcaaaaagtgaagcagggacataaaggtactcagcctctgtaaaggctcagcctctgtaaaggcacagcctctaaaactggccagaaccagtccatggaggatggtctcttatcaggagaaagttactgaaatcagtcccttgtccagagaaagctgtcgttaaggttagtggggcaggagatcagttactcagcgtctgtgaactgggtgagttgtaattgttttaatcttgcttctctcacagccagtgcttgcttggctgctagagaaaaataaaacccatgtggtagttagaatctagttaattctttaagagtagggtacaagacttaaccctcgcctggcatggccctaggccctgtttataatttgaggtcttattgccacaaagagtctgttctgtcagtctcatgatctctattttaacattaatgctgctcagttgttgggtctaaaccataagagggagggaggtacagggaggtatgtctgacctcctgtcctgtcatggccgagaactgaattttaagatttatttgaggttccgttggccaacagggggtctgttaagtcgggtggggggcttaggattttattttttgttctcaagggagataaaataatttaatccattggcctctgtgactgtgggactaacatggctatgatctgtcggacagacttcaggctggcacccaggcaaaattctatgctgtagtaaatgcatcatgcacatttgtaacaacacgtacataacaatgtcacaaaatactttcacggtgacaactagattagtgttttattgaatagctgatgacataaactgtctcatttggtgccaagactgaccatcaccagcataccaaggtcatcactgatcagaggtctaacccaaggagggggtcatgtgcaggcccagcggtggggaggaaagatgctgcagaggagatggatgcccacagaggcccctgagcggataccatgctcactaagtggtaagtatagactcaacgtaggctgtaagctctccccctgtgtaaatgggaccccgtacacttgagagtcaagggtctgtttgggtggcagggatagccacttctgaaggtagaaaggaaaataagccaccaaattggtacctttctgtgaaatggacatcgtgctcagaatctccattttccccacaacctggaggagtaagtactgtcatctgcattttgtagctgaggaatctgactcaacaaaattaaattactcgcctaagcaattagcaatcaaccaagtctttctgactcagaaacccagctattgcctgttcatatccagcccctgtattggggtcaagatctggcctgttctcaatgcagcaagatccaggcagatcacactggactcccagcactgaatctggctcgaggggacatcaaatttgactgggtcatggggctcaggagcatcactctcaaaaatagcagtacaggaagaggcaatggccctaaacagcatttgcaggcagatcccatgttaatcgtaagggtcaggactctctcacttttctgtctctctctctgtctctcctctagggctgaccccacatcggacaccactgcatccatgtccatcacaacacagctgccttttcttctgcctgcttatgggaaagtcccctcctctcctccgtttccttctcttcctgccctatcacactgtgcacttctccctttccttaaagaaccaccatcaactttaggaggagggaaaggggtggctctgggaggaaaagccagaatcccctctagccagcagagagagaggaatggctgcatgttttctcccccaatccaaggcactaggttttggctaggttgcaggttccaagctgctctcctgctgtgtcggtgagttctggttaacctgcaacctcctgatgtggccactgcagttcatcgagtcttcagggactccccatggcctggagtactttgccttgcttacatgggagaggagaatggatttatagagaacatcatctaaatccaacttgaccattgtgtggccacacttgctagattgctatagtctaaatctagcattgtagaaagacgggggagcttggagctgcacaaacccaggtctggaacgggctccttaccttggaaggtgaatgatcctggtaggactcttagcctccctgggcctcagtttctttatctgtttcatgggaatgaggatctcggctggttggttgggtgatgcgggggctgtgtgaaaacagcttgtcaatacaagctgaaatagaaatatttctccacagagtatgaagatcaaatgagagaatacatttaaattaaatggaaaattaaaatggcaaaaaaggcaaagctgtattgaaagttccgagcttctctataaggagctttttgactatgtaagaatcctgtactcgttccccctaaatataaaaaaaaaatgttgaaggaggcagaagggagagtgatgcacgatgggcgaggacttcacctgctgttgctggctttgaggatggaggaaggaggccacaaacctagaagctggagcccctagaagctagaaaaggcagggacccgattcatcccttgagcctccagaagggacatagccctgccagcaccttgactttagcccagtgagatcctcttaggacttttggcaaccagaactataagacagaaatggaagccactgagtctgtagctgtttgttgcagcagcaatagaaaactaatgcagagcccaagaaatcactggtgatgagatggggaagtgggctcaggaggtctggatctgtgatgagatggggaaagtgggctcaggaggtctggatctgtgatgagatgggggaagtgggctcaggaggtctggatctgagttggggatctggagtggaaggggaattcatttgttcattgtctatccttttgcattaattgaatttttttctatacatacatgtgaattttcacaataaaagttttttccaaaataaaataaaagaaacaaaaggggctttttgcaacccaattcctatctatgtctgagtccacttgtattgaatgagtctttctgctaacgtccttatatttgggtgactatctgaatgtcagtgaccaatcagagcagaggcagaccttggagtgggcagggcatcctgagggccctgattcctgccataaggcataaccctttaggtgccagaccatggggaggtccaggggttgcaggggagggctgtgcatctgcaatggctctcagggggctcccggtggtggcaattggtgaatctgcatggtggtgtttcagtattgtcacaaccctgctgtctctcatgctctcaaaaagcatttctcttacctgtgacagacttcctatacctaacagcttgcaaaaatgttccagattaatgagaataatctctcggagccatacctccctgcttggggtctcagtttccccaaatgtctccagacaagttaggctagaaggcccctgagtctcagcccctctatagccctcctgtcacccagacctgatctgggtcttgcaccctgggtgcagcatgacaggggtgggcaggggctggctctgggccagaggaccctttctgatggacttcagctgttggccttccaggggagactgatcaacctcacaagagtcatatggtgagtagcggtgggcaaatccatccccctcatcttagatttatggggagacagagacaaagaggagacactccaggaagacctgcaggtgggagtaccaggttgaaaccaaggacaccttcctggaggagctgccgtttgagccagctctgagaacaggtggagacaggactggagaggaggaggttgtgccctatgagcaaagactggccaccaccccatctaacacccccacagggcccctgtggcatccctgtccagtccctgtcaccacccagtttttccctctggacccaggaattcaaagtaagcaaggaggtccgctgctccagttggctgcaaataattacaaccttgagcccaagcagcactttgggtcctggtttgggaccatgaagcggctcggtgagactgagaggtaaggccagggcaggaattgggatagtaggattgaactctccctgggggccagcctcagaaagcctgtggccatggcctcttggccaacatcagatcctgtggtctggcaatgcctggggtacccagacctcactctggacaggccctgggagggggccctggtgagattcctggcagcctcacagccactcttctgtccatagctacaacctgtcatgccagctggaggctccatcccagttggctgggagcataaagtccaggaagatagacatcacccaccacaggggccagtcagggcctgaaccagggcgggcagaggttggctgccttgggatatgggtgggctcagggagtcagacagcaagggactagcctcccatcctactgctgagcagccctgtgactggggagagtcaccttacttctctgggcctcagtttccccctctgtggagtgacactaaatgatctctctggagacggggatcaatagggtactggtgattgaccaggcactcagcacatgcctggagcacacagtgcagggctgtggtggggaggtgggctgagttcctagggagtcacccatgtgtgcctgccgttctgaccagccaccaggccctcagggcagagcccactaccagcagcagctcacaccccaagaccagctcagaggcggcccctacctcagcagcagggacatcacagacactttgagctggcactagggtggcttctccagctcccacggggagaggggtcccagctgagtcccactcacgtggagtctcatgcccatgaaagtgccattcaccactggccaggctcatgaggccgcatgagaggggggtcactggggaggagatatcgggggaacagagagggtggttgaatttttgtataataggcagtgcaagtgtttaccgtttggcaggggaaaggtttgttattattagcaatgctacacttcaatattacactaaaatccagtttctctataacctgggagttgctcttttgttctttcttttcccatcttaattaaaatgagatgcagactctcacggtccacagtcgattaagaaatcttgcacggccatcaggttatgtcttggagagcagagtttcagtaccatcagcctggcaaggagctgggcctgctcctcagagctcccgggactgcgagaattggcatgttcacaaggcaccgtcacagcctctgaaacacgctgtctttaaagatgtttgcaggctggacgcggtggctcactcctgtaatcccagcactttgggaggcagaagcgggtggctcacttgaggtcaggagttcgagaccaacatggcaaaaccccatctctactaaaaatacaaaaaattagccaggtgtggtggcaggtgcctgtaattccagctactcaggaggctgaggtaggagaactgcttgaacccaggaggtggaggttgcaatgagcagagatcacaccactgcactccagtctgggcaacaagagcaaaacttcatctcaaaaaaaaaaaaaaaaaaaaaaaacacaaaacacaaagacatttgcaaggaccatgtcctcacccagaatggtgcctgcctttctacagtttttcaggaaaaggaaacattttctgcttctctcgctgaggttttttttaaccacccattaggaacctatagatttcaggatcgaacactgggattccctcagcactaaaggaggacaattgcaaacagagctgaaagtgcaatgtggaaaggtcaggctgaggaaggttcttagccagtagaccaagggcaggaaggacactgcctcctcagtctcccactagggaacttgtgattcttgtcccctgacctcagaattccttgtcatgtttgttttgtctccaagggaagggtttgaattacagaatttaaggctagagtgggcctcgtgcagttaacattaaccctctctctccttcgctggccaaggtgaagtccggaaacatgtagttctgacgtccactctctcgggggatcaccagttcacccatctcacccggcaagctgggacctagtttggcgacaggcatcttccacccacctgggaggcagggttcaacactctgcctctgaccttgtttccttcttctgccacctgcttaggcagccagaaggggttgtccagccagcacctgggctttggcgctcctcaagcaggtggaggaagtttcaggcacctggctcctcaggtgtctgccatccaggtgctcttcaggcctgcccagcagagctctcttgatccagctagaactggccagaactgactcactcaggaatgtgtagactttggcatcaggggctgctttaatttgcacaatttccaaatacctcttttttcttctttttctgatgagtcatcttcctagactttcattttaaagagatagatagttatcaggttccagagaagacatggtagaacatttatatctcaaagacacagagctgagacttcagttttagatactataatttgcctaaaccaaaaaggaaggtgtaggtaaagttctagtcaagacaggatggccaggaaaaacaccttaaaccaagggatggcttgctttgctgatttaagccaatggcttctttatcataagacttcccagtgatttagtcctccctctcttccagtgcacagagacatacccctccttacaaataaaaatgttctttatagatgtaaatttattttacaaaaatgtttcaaaataaccagatgaaaatcatccttatgccagaaagacttgttttttttttcattactagaaatgaaacagtaagtatttgttgtattgacatacttaggcttagacctgtgtttaacaagaaagcctaataatagcactgtggttagactgtagcctatttttccaaaccatcattttattattaaggaaacgaaggaccaaatacctttcattcatctgatatgatcctttaaaacacattccactaacaagtcccatttggaacagctgaaaatcttttaataaaactttttaaagatgagctcatggcttagtgtaaatttcacaagcttaattaggtcaaatggaaggaactcagatgagtagttgcccaatcagagcccattatttgtaagtcatcagacccctccatgaccttaaaactccactctgacctgattattgcaaacctatatacaaaaaagtgaaaggattaattttcattcatcaacctctcaatcccagattttcaaagaaaaaacctatgtaaggaatacttaccaaaaccagacaggaaaattagagcctgcatactttagagtcaaatttgttccactacagccaggtcgcatacaattacatcatttggttcttcatacactctagaactgactaggacagagtttagcatagaagaactgtaagaaataggttctgaaacatagaaattgcaaagttcaaaaggctatgaaaaaaactaatgtaaatgagagactcccctcactttgttttaaagaaatagacccatcagagaaatgcaaatcaaaaccacaatgagataccatctcacaccagttagaatggtgatcattaaaaagtcaggaaacaacaggtgctagagaggatgtggagaaataggaacacttttacactgttggtgggactgtaaactagttcaaccattgtggaagacagtgtggccattcctcagggatctagaactagaaataccatttgacccagccatcccactactgggtatatacccaaaggattataaatcgtgctgctataaagacacatgcacacgtatgtttattgcggcactattcacaatagcaaagacttggaaccaacccaaatgtccaacaatgatagactggatgaagaaaatgtggcacatatacaccatagaatactatgcatccataaaaaatgatgagttcatgtcctttgtagggacacggatgaagttggaaaccatcattctcagcaaactatggcaaggacaaaaaaacaaacaccgcatgttctcactcataggtgggaattgaacaatgagaacacttggacacaggaaagggaaaatcacacaccaggcctgttgtggggtggggggaggggggagggatagcattaggagatatgcctaatataaatgatgagttaatgggtgcagcacaccaacatggcacatgtatacatatgcaacaaacctgcacattgtgcatgtgtaccctagaatttaaagtataataaaaaaaataaaaaaataaaaaaataaatagatgttctgtaaaaatatacacaatttttacagacaaatacatttataagttgtttttatcttaaaaattggggatatttcatatttataactaattattgaaccttaagttttcttggccatttataggctaataaactaagaatcatgtaaactaagccaaagtagaatagacataaaagtcctaacacttcaacttcctatccttcaagaagtatacctcgcaaagctcatttgagagaggaaaagctttcctccaccctctgttttacagcgctgaggtttctcatcacatttctatgacttatagcttaaatccatgttacatggtcactggcattgttagtgcttctcttttaatactgtagaaattaatcaatttggtggcgtatttaattaattctatcactagaggattgtaaaattacatatatgaatacctcactttagagaccacttaattttttttccaaggggatatttgactatatttcacttgtgtcttatttaatgattttataatttaaaccctaaattataaatctagaatttagagagtatatttccccactggattacatttttggaattattatatgtgcacaaatattacaaaatcactgtagacacctgaaaactatattatcttttaaaagcaatatttacattaaactggtataacaaaattgtttggtgcattttttccagtacattttgtatatattacatgtttaacctttttttattcagcaaataatttttgagtatctactaagtgctaggttctgcattactaattgaatttaaagagtgaaataacagacatggtctcagacaataaaaattaacattaggtcacctatttacatattttaaaatggtaattatgaaaactttgagattttaaactagataacattataataatacacttgatgttgttaatatttgccagtgagcaaaaaagaaaataaaaagatggttttattcaatatacactttaaaattgcagaaaatagtcaagtttctctgctttgcagtttaatgtctatgtgtttttctctgcaacttggcttttgtggagtgaaacaattattcttccagcccaataaaggcagaagagtaacaataaatctaatattttaaatgcttatcaaaagatagtaaacatattatttcagaatactgagttcaataagttgacctacaaaaaaagccaaactgacagtattactgaataaggaaaggcccaaagagacaaaatactttttattttgtaacctcggtatgatacaacttaccctaactataaagaccctaaattaccaagatgggtgcttataatatggagagtaaaaaaagtcatttcacttttagcttttttatttctctcagaataaaaagtgtataaggagtttataaagaagttgatactataagttagtactacaaagacagcacttttcaagaaaagacttttttctctcttacaaatatcatgttagcagtatttgttttctccagaaataatgaggaaataaaaacataagtatgtgggtaattagtgtagtttcttaaagaaatgagttaggcaacaggctaataatgtatacttcgctggcttttgaatgccaacaatcatattctttataaggcacagagaagatttttctgaagaataagtatgtgaacctgaaaagtaatcgccacttggtagtgacaatatggatagggtgaagggcgtcatcaagaagcaatgaaaagatacatttgcagttaaatttgaaaaccatgatgtttaatacatatagtaataaagaatactttctcctatttcaaaattattttagaattaagatagaagctaaaatacctagggataatgatatgactatcaaaaattaaaaattaaaggacattttgagtattataagttaagaatgagaacttattacccaaagaacaggggataattcattatgctccatatccattgaattaaaagacaggcccattacctggataatttgaaagtttaattttatttaaaagtcttgtttcattcatcaagctaaaggattagctcccagaaatattctaggattgcatatccccaactctgtaggaagtatagaaagaatgttataagggccaccatctaaacattattatgtaaataatttagtaccattccatttgcctttgtagatttaaaaatgtaaatggctttctcatattaggaaacatcacttttcaaaacccagataaacatagtatattgcaagagaataattattttctttattaaaaaatactggatgctaagtccaaaagacataaattattttatactaataactactaacattttattcattaaaatataaaggtcaaagattttaaaatgatctttaaatgattaataacatgttgatctttttcttctttctgtaaacctttttgagtcttaacaatactaaactatacaagcaatattaaatagtatataaacggattaaaatattcaaatttactagaatgtggacattggaaagaatgaaaataaacagaagcataaagcagcagatataaaattaagaaagcaactaagagtgtttaaagtacatattcatctgtagtctaatgtctaccataaacaatgactcttctcagtaaaacacaaattgttcatgaagggaaaaagcatgttgtattagagaatattcaacataatttttttagtactaacttgtgcctggagtattattggtttttccattatgaacttatgcacttgataatttttttcataaaaattgtatgtacaactccattcaaaagcagtttttggtgggttttttttttttttttgagatgagttttgctcttttcacccaggctggagtgcaatggtgcgaatttggctcacagcaacctagcaacctttgcctcctaggctcaggtgattctcttgcctcagcctctcgagtggttagaactacaagcatgcaccaccatgcctggctaattttgtgtttttagtagagacatggttttgccatgttgaccaggctggtcttgaactcctgacctgaggtaatccgcccaccttggcctcccaaagtgctgggtatgggcaagagccaccatacctggcctcaaaagcagtttttaaaagcaaacacaatataacaccaaagttgaaaaatctatgctcacccaaggatgccaggtttaataaattatttatagaatactgcatcaaaaataagacaataacccaaaatataccattaaagatgtatccactcctacaactagagataattaatctatctggtagcaaatgatacttcaatcagtttcagcatgtctgaaatctttaaggacaaaagtgataaaacatgacttcattcttcattagactcttagaacacttgaaggaaaataatttctgaagcacaaagaggtaaagaggtgtaatctttcaaaaagatattcagtgttcaaaatccaagagtgcaatatcaggctgggtgcggtggcttatgcctgtaatcccagcactttgggaggccatggtgggtggatcacctgaggtcaggagttcgagtccagccaggcatggactctggctgtactaaaaacacaaaaattagccaggcatggtggtgtgcacctgtagtcctagctacttgtggggctgagacaggagaatcgcttgaacctgggaggtggaggttgcagtgaaccgagatcatgccacctcactccagcatcagtaacagaatgagattccatctcaaaaaaagaaaagagtgtaatatcggtatacacagataatatactgaatgaaacaaatagaataatttgaagaggtatcttgatgaacaaggagtcattagaaaggttgtattcatgtctttgaaggaaattgcaatgtgagaaattaatactttgactactatactaaaagtttattgctaacatgtattgagttattaacgtgtgttaggcagagtgccatataatttacaagtgttatctcatttattgcaggtgaaatgtaatttcgaactctggaagtataaatgaattagatagaaaaaaattctatttaaatggccaccagtaaatcggtatctaggaacagggtgatacagtgcccaagttttctattcttactaaatgttgtgtttcattttcaatgttttcttggatattgctcttttttggtgattttgatttttttttattttagaaaactaataaattgactcttcttggtactgactcgggttttatagaagaaaaagtaaattctgtacatttacctttacctcatctttttctcttttaaatttactatattttttattttttttgtaattttattttatttttctatgattattatttttattattattatactttaagttttagggtacatgtgcacattgtgcaggttagttacatatgtatacatgtgccatgctggtgcgctgcacccactaactcgtcatctagcattaggtatatctcccaatgctatccctcccacctccccccaccccacaacagtccccagagtgtgatattccccttcctgtgtccatgtgatctcattgttcaattcccacctatgagtgagaatatgcagtgtttggttttttgttcttgcgatagtttactgagtatgatgatttccaatttcatccacatccctacaaaggacatgaactcatcattttttatggctgcatagtattccatgttgtatatgtgccacattttcttaatccagtctatcattgttggacatttgggttggttccaagtctttgctattgtgaataatgccgcaataaacatacgtgtgcatgtgtctttatagcagcatgatttatagtcctttgggtatatacccagtaatgggatggctgggtcaaatggtatttccagttctagatccctgaggaatcgccacactgacttccacaatggttgaactagtttacagtcccaccaacagtgtaaaagtgttccgatttctccacatcctctctagcacctgttgtttcctgactttttaatgattgccattctaactggtgtgagatggtatctcattgtggttttgatttgcatttctctgatggccagtgatggtgagcattttttcgtgtgttttttggctgcataaatgtcttcttttgagaagtgtctgttcatgtccttcgcccactttttgatggggttgtttttttcttgtaactttgttggagttcattgtagattctggatattagccctttgtcagatgagtaggttgcgaacattttctcccattttgtaggttgcctgttcactctgatggcagtttcttttgctgtgcagaagctctttaattagatcccatttgtcaattttgtcttttgttgccattgcttttggtgttttagacatgaagtccttgcccatgcctatgtcctgaatggtaatgcctaggttttcttctagggtttttatggttttaggtctaacgtttaagtctttaatccatcttgaattgatttttgtgtaaggtgtaaggaagggatccagtttcagctttctacatatggctagccagttttcccagcaccatttattaaatagggaatcttttccccattgcttgtttttctcaggtttgtcaaagatcagatagttgtagatatgtggcgttatttctgagggctctgttctgttccattgatctatatctctgttttggtaccagtaccatactgttttggttactgtagccttgtagtatagtttgaagtcaggtagtgtgatacctccagctttgttcttttggcttaggattgacttggcgatgtgggctattttttggttccatatgaactttaaagtagttttttccaattctgtgaagaaaggcattggtagcttgagggggatggcattgaatctgtaaattaccttggggagtatggccattttcacgatattgattcttcctacccatgagcatggaatgttcttccatttgtttgtatcctcttttattttgttgagcagtggtttgtagttctccttgaagaggtccttcacatcccttgtaagttggattcctaggtattttattctctttgaagcaattgtgaatgggagttcactcatgatttggctctctgtttgtctgttgttggtgtataagaatgcttgtgattttcgtacattgattttgtatcctgagactttgctgaagttgcttatcagcttaaggagattttgggctgagacgatggggttttctagatatacaatcatgtcatctgcaaagagggacaatttgacttcctcttttcctaattgaataccctttatttccttctcctgcctaactgccctggccagaacttccaacactatgttgaataggagtggtgagagagggcatccctgtcttgtgccagttttcaaagggaatgcttccagtttttgcccattcagtatgatattggctgtgggtttgtcatagatagctcttattattttgaaatacgtcccatcaatacctaatttattgagagtttttagcatgaagggttgttgaattttgtcaaaggctttttctgcatctattgagataatcatgtggtttttgtctttggctctgtttatatgctggattacatttattgatttgcgcatattgaaccagccttgcatcccagggatgaagcccacttgatcatggtggataagctttttgatgtgctgctggattcattttgccagtattttattgaggatttttgcatcaatgttcatcaaggatattggtctaaaattctctttttttgttgtgtctctgcctggctttggtatcagaatgatgctggcctcataaaaagagttagggaggattccctctttttctattgattggaatagtttcagaaggaatggtaccagctcctccttctacctctggtagaattcggctgtgaatccatctggtcctggactctttttggttggtaagctattgattattgccacaatttcagatcctgttattggtctattcagagattcaacttcttcctggtttagtcttgggagagtgtatgtgtcgaggaatttatccatttcttctagattttctagtttatttgcgtagaggtgtttgtagtattctctgatggtagtttgtatttctgtgggatcggtggtgatatcctctttatcattttttattgcgtctatttgattcttctcttttttctttattagtcttgctagcggtctatcaattttgttgatcctttcaaaaaaccagctcctggattcactaattttttgaatggtttttttgtgtctctatttccttcagttctgctctgattttaattatttcttgccttctgctagcttttgaatgtgtttgctcttgcttttctagttcttttaattgtgaggttagggtgtcaattttggatctttcctgctttctcttgtgggcatttagtgctataaatttccctctacacactgctttgaatgcgtcccagagattctggtatgttgtgtctttgttctcgttggtttcaaagaacatctttatttctgccttcatttcattatgtacccagtagtcattcaggagtaggttgttcagtttccatgtagttgaatggttttgagtgagattcttaatcctgagttctagtttgattgcactgtggtctgagagatagtttgttataatttctgttcttttacatttgctgaggagagctttacttccaagtatgtggtcaattttggaataggtgtggtgtggtgctgaaaaaaatgtatattctgttgatttggggtggagagttctgtagatgtctactaggtccgcttggtgcagagctgagttcaattcctgggtatccttgttgactttctgtctcgttgatctgcctaatgttgacagtggggtgttaaagtctgccattattaatgtgtgggagtctaaagtctctttgtaggtcactcaggacttgctttatgaatcttggtgctcctgtagtgggtgcatatatatttaggatagttagctcttcttgttgaattgatccctttaccattatgtaatggccttctttgtctcttttgatctttgttggtttaaagtctgttttatcatagactaggattgcaacccctgcctttttttgttttccatttgcttggtagatgttcctccatccttttattttgagcctatgtgtgtctctgcatgtgagatgggtttcctgaatatagcacactgatgggtcttgactctttatccaattttccagtctgtgtcttttaattggagcatttagtccatttacatttaaagttaatattgttatgtgtgaatttgatcctgtcattatgatgttagctggttattttgcttgttagttgatgcagtttcttcctagtcttgatggtctttacattttggcatgattttgcagtggctggtactggttgttcctttccatgtttagcgcttccttcaggagctcttttagggcaggcctggtggtgacaaaatctctcagcatttgcttgtctgtaaagtattttatttctccttcgcttatgaagcttagtttggctggatatgaaattctgggttgaaaattcttttctttaagaatgttgaatattggcccccactctcttctggcttgtagggtttctgccaagagatccgctgttagtctgatgggcttccctttgagggtaacccgacctttctctctggctgcccttaacattttttccttcatttcaactttggtgaatctgacaattatgtgtcttggagttgctcttcttgaggagtatctttgtggcgttctctgtatttcctgaatatgaacgttggcctgccttgctagattggggaagttctcctggataatatcctgcagagtgttttccaacttggttccattctccccatcactttcaggtacaccaatcagacatagatttggtcttttcagatagtcccatatttcttggaggctttgctcattccttttaattctgttttctctaaacttcccttcttgcttcatttcattcgtttcatcttccatcgctgatactctttcttccagttgatcacattagctcctgaggctttgcattcttcacgtagttctggagacttggttttcagctccatcagctcctttaagcacttctctgtattgattattctagttatacattcttctaaatttttttcaaagttttcaacttctttgcctttggtttgaatgtcctcccgtagctcagagtaatttgatcgtctgaagccttcttctctcagctcatcaaagtcattctccatccagctttgttctgttgctggtaaggaactgcgttcctttggaggaggagagcgctctgctttttagagtttccagtttttctgttctgttttttccccatgtttgtggttttatctacttttggtctttgatgatggtgatgtacagatgggtttttggtgtggatgtcctttctgtttgttagttttccttctaacagacaggaccctcagctgcaggtctgttggaataccctgccgtgtgaggtatcagtgtgcccctgctggggggtgcctcccagttaggctgctctggggtcaggggtcagggacccacttgaggaggcagtctgcccgttctcagatctccagctgcgtgctgggagaacaactgctctcttcaaagctgtcagacagggacatttaagtctgcagagattactgctgtctttttgtctgtgccctgcccccagaggtggagcctacagaggcaggcaggcctccttgagctgtggtgggctccacccagttcgagcttcccggctgctttgtttacctaagcaagcctgggcaatggtgggcgcccctcccccagcctcgctgccgccttgcagtttgatctcagactgctgtgctagcaatcagcgagactccgtgggcgtaggaccctccgagccaggtgcaggatataatctcgtggtgcgccgttttttaagtccatcggaaaagcgcagtattcgggtgggagttacccgattttccaggtgccgtccatcacccctttctttgactcggaaagggaactccctgaccccttgcgcttcccaagtgaggcaattcctcgccctgctttggctcgcgcacggtgcgcgcacccactgacctgtgcccactgtctggcactccctagtgagatgaacccggtacctcagatggaaatgcagaaatcaccgtcttctgtgtcgctcacgctgggagctgtagactggagctgttcctatttggccatcttggctcctcccccttaaatttactttaattgacatataataaatgtacatgttatggggtacagagtgatattttgatatatttatacgatgtgtaaagatcaagtcagagtcattatcatatccattacctaaatcatgtattatttctttgcagtgagaatattcaaaatcttttattttagttatttgaaaacacacaataaattcccattaactacagtcacccaacagtgctgtagagaactagaacttcttccttctctccagctgtaattttgtatgtattaaccacatttttcttatactcttctttctcctactctttccaggatatggtaaccaaaactctactatctacttctacgggattaaaaattttagcttccatacataagtgagaacacgtagttatgtggtgtttatgtttctatgccaggcttatttcacctaacataatgccctccacttgcattcttgttgccacaaataacaggattttgttctttattatgactaaataatattccattatatatgtatgtcacatttctttatccattcatctgttgatggacacttttgttgattccatatcttggctattgtgaatagtactgtaataaacatgggggtgcaggtaactctttgatatactgattttctttcctttggatatatactgaaaaccatatgattaaattaataaacacaataaaagcgtttggcaaaattaaatattcttacatgacaaaaaacctctcaacaatttagtatagaaaatatatgccttaacacagaaggacataaaggacaaatctacagctaagatcatactgagtgtggaaaacgtgaaagattttactgtgaacaagaaaaagattttactggaacaggaaaaggatgcctattctcaccaatcatatttcacatagtgaaagtcttagccaggacaattaggtgagagaaagaaataaaggacatctgaattggaaaggagacagtcaaactgtccctgtttaaagacaatgtgatcttatacacggaaaaaaataagactctaccaaaagcttcttagggtgatacatgaaattaataaagttgcaggatataaatcaacatacaaaaatcagtagcatttctatatattgatagtaaactagctgaaacaagaaattaagaaagcaattccttttacaatagctacaaaaatgtacttagaaataaatttaaccaaggaagtaaaagatttcgacaacaaaaatgacaaatactaatgaaagaaattaaagaaaacacaaaaaaggaaagacatccacgtttatagattgaaataatattcttaaaatgacccactatcctatgtgatttacaaatttagtacaatcactagcttgtatttttaaaagcacctttgctgcatattcttaagatattcaatgacaatgcctggatttaagtttgaggtattattatatctattttatactgggcacaatataatgttatcagaggtaatggttttgattggtcctaggtcatacagtaatatatacattgtgatttatagacatgctatcttttaatactcaggcatttacaaagttcatttagacaaagttataaaaacttgccttcctttccgcctatatcacctaaaaatcctaatttaagaggtaataacattttttgatatacaatttatcaacacaataaaaatctaacaattatcatgtgcagagtgtgaaaatctcatcagattaaggaacacaaagacatctttttcatatttcgaatgtaaaactgttttggaaactgttatttttagaaacagttaaaaacattttttcattagtttttcatgtaaaattgtgacaaccagcatgaaataactgtcatcacagaagcatggtatattcgattccaaaacatattctttgtaagttttaatatatttatgtattatttatacttacattgtaacccataatgtacagatattatttttccttcaactcttaagaatattcttaaataataaaaaattaatgatttataatttttgttggttgggaaaaagaatagacacacacgtgacagtgcatcacttcacctcatcatttcatctcatcattttatctcatcatttcatctcatcattttatctcatcatttcatctcatctcatctcatcccatcatttcatatcatctcatttcatcaaatctcatctcatctcatttccatttcattttcattatttcatttcatcatttcatttcactatttcatttcatttcatctaatttcatttatttcattatgtcatttcatatcatctcatttcatttcatctcatattttttatatcatttttcatatcatttttcatctcatcatttcatctcaattcatttcatctcatcatttcatctcctcatctcatcatttcctcctttcaacatttcatctcatttcttctcatctcatttcaatttcatttcattatttcatctcatttcattatttcacctaatttcattatttcatctcatctcatctcaattcatcatttcatctcatttttcatctcatcatttttcatctcatcatctaatctcatttcacttcatttcatctcatcatttcagctcatcatttcatgtcacatctcatttcatcatttcatttcaacatttcatttcatctcatctttcaatttcatttcaatatcatcatttcttttcatttcatctcatttcattatttcatttcatttcatctcaccatttcatctcatcatttttcatctcatcatctcatctcatcatttcatcatttcatctcatttcttctcatcatttcatctcatcattttatctcatttcatctcatctcatttcaatttcatttcattatttcatttcatttcacttcatttcatctcatcattttatctcatctcatttcatctcatttcttctcatctcatcatttcatcatttcatcttgtttcatctcatttcatctcacctcatctcatcatttcatctcaacatttcatctcttcctttcatttcatctcatcgtttcgtctcatctcatctcatctcacctcagcatttcatcatttcatctcatcatttcttatttcatctcattttatctcatttcatctcatatctcaattcaatttcctttcattatttcatttcatctcattcatttcatctcatttcattacatctcatcatttcctctcatcattacatctcatctcatctcatcatttcatcatttcatctcatcattgcatctcatcatttcaaatccatcattcatctcgtcatttcatctcatcatttccatttcatcatttcatttcatcatttaatttcatcatctcatttaatttcacctcatttcattatttcatttcattttttcatttatgtcatttcatttcatctcattacatttcgtctaatttcatttcatcccatttcatctcatcatttcatctcatcttttcatctcatcatttcatctcatcttttcatctcatcattttatctcatcatctcatcaactcttttcatcttatcatttcatcatttcatctcatctcatatcttctcatctcatttcaatttcatgtcattatttcatttcattatttcatgtcatctcatctcatcatttcatctcatcatttcatcattttatttcatcatctcatcttatcatttcatctcatttcaattttatttcaatttcattatttcatttcatttcatctcatcagttcatctcatcatttcatctcatcatctcatctcatcatttcatctcatcactcatctcatttcatatcatcattttatctcatctcatcatttcatctcatttcatctcatctcatttcatcattacatctcatttcatctcattttatgtcatcatttcatgtcatcatttcatcacatctcatcgtttcatctcatcatttcatcatttcatctcatttcaactcattgcatctcatctcatcatttccatttcattattccatttcatcatttcatttcattatgtcatttcatctcatcatatttcatctcatctcatcatttcatttcatctcatcatttcatctcatcatttcatctcattttatctcatctcatcatttcatcatttcatctcatcatttcttctcatctcatcatttcattatttcatttcatctcatttcattatttcatttgtcatttcatctcattacatttcatctcatcatttcatccatcatttcatttcatcatttcatctcatgatttcatctcatctcatctcgttatcgcatttcatctcattattgcatctcatttcatctcatctcatcatttcatttcatcattacatctcatcatttcaactcatttcaatttcatttcaatttcatcattacatttcataatttcctttcattatttcatttcatttcatctcatttcattatttcatttcatctcatttttcatctcatttcatctcatcatttcatctcatcattcatctcatttcatctcatcattttatctcattatttcatctcatctcatctcatttcaatttcattatttcatatcatttcattatttcatttcatctcatcatttcatctcgtttcatctcatcatttcatccatcatctcatcatttcatctcatttcatctcatctcatctcctttcaatttcttttcaattttgtcatttcgtctcatcatttcatctcatcgtttctactcaccatttcatctcaaaatttcatctcatcatctcatctcatctcatcatttcgtcatttcatctcatctcaagtcatcttatcatttcatctaagtgaaatgatgtaatggaatcatgaaatgaaatggataggatgccctcagtgatgttaaatttaaaaattgtttcttttcatgtatgcatttttatatttatatgtatttatatttatatttacttatatttctttttacttatttttatttatatttttacttatttctttatttatagacaaggtcctgttctgtggcctaggctggaatgcagtggtgcattcacagttcactgcagcctcgagcaaacctcccaccttagcctcccaggtggctgggaccccaggtgcacaccaccacacctggttaatattttattatttgtagagatggagtcttgctattctgcccaggctggtctcaaactcctgggctcaagcaatcctcctgcattggcaacccaaaatgctgggatgacagatatgagccacagtgcccaacctatttatttatttatttatttaataaggacaaggtctcactatgttgcccaggctggtcaactcctggactcaaatgattctccaaacgtggcctctcaaaatgttgggattacaggtatgagccaccatgcctggctaaaaatagtattatatttttgtatcatataattttcaattaggtaatatgaatattctgtacaggaaatacgcccttaattacataggaataaacatttgttacactgagaaaaatctaacagagctaaaaataaaaattaatttggaaaggtcattagatactgacacattcttacgtttatacattctttcatatattcatatattcttttaacagtatcaatggtttggagttatgtgtacaaaaccatgacctatatgtaatacaactaataacaggcacttacaattcaaggcatattatatacaaagctttaacttcttatcaaaatattttgttttttttctttctgttttggcagatactatgaatacaacattcaactcacagacaccatggagcccttactaagcataaagtactgtgaaaggccagggctaggacagaactgagacagggccagggataggacagaaccggggcagggtcatggccagagaaaaaccaggggcagggtcacagccagggacatgagaggaccaaggccagggccagaagcagggcagaaccagggccagggcagggacatggcagggccagggccatggcaggatcagggtcagcagaaggccagggcagggctagggtagcacagggccaaggcagggcagggtcagtgtagagcaaggaacgggccagggtatggcagggcagggacagggaggtccagggccagagtcaggtccagcacatggacagggcagggccagaaacatggcaggaccagaaaggggacagggcaagggcaaggccagagaaggaccatggaaaaaacatggccagggagggtccagggcaagggcaaggccagggcagaaccagagccagggcaggccaaaggcagggccagggcagggcaaggccagggtagggtggggccagggtagggtgagggtagggccagggcgagttcagggccagggcaggactaagatagcacagggccaaggcagggccagggcagggccaaaaggaggggccagggccaagcatggccagtgtcagacctggggattgtcagggccagggtcagggtcaaggctgggccagggacagggccagagcaagggcagggccagggagaaagcagaaccagagaggatccagagcaaggccagggtcagggaagaaccaggaccaggataaggcaaagccaaggccagggcagggcaagaccagggcagggcaagaccagggcagggcaaggccagggtagggccaggccagggtaggagaaggccatgatagggccaaggccaaggcagggcagggctagggtagcacagggcatggccaaaaacagggcagggccatagcagtggcaggactagcaacagggccagggcaagcgctggaccacagcatggtggggacaatacagggccaggacagaggatggcaaggcaggtccagggccatttcatggactcggtaggcctggggtcaggccagggcagggcaaaggcaaggccagggagaaggcaaggccggggccaaggcagtgccagggcagggcaggaccagtgcagggccaacgcagggtgagggcaaggccagggcatggaagggcagggcaggaccaaggggaagggccaggagagggccacggcagggtcacggccagaacaagggtatggctggggtcaggaatatggtaggacgagggctgggcccaggctgggacacgcagggcagagcatggcctgtgcaaggcacggccagagccaggccatagagatgggagggcaacaccaaggcagagtcagggtagatccagggctgagcagagtcagggcaggtccagagtcgaggcagagctagggcccaagcagggccatggtagcaccagggcagaggagggcagggcaatgcaggactgggccatggcagtgcctggtcaactccggggcagggccagaagcaggacagggccagggccaatgctcaggccagggacagggcatgacaggacgtgccagagcagggctgggccaatgttggggcaggacaaatcagaccaggacacctccaagtccagctctggccctgccttggccctggacccttcctggcctgaccttgtccctggccctgccctatccatgccctgtgtgtttgaccactgttttataaccagaatcctacaagaaacttaaattagttctttttgtgcatttttagtagagatggggtttcacaatgttgaccaggctggttccaaactcctgagctcaagccatctgcctgccttggcctcccaaagtgctgggattacaggagtaatctggccaagtatttaacttctttatgcctgtttcctacatttggaaaatggggatgctttaagtacctagcacatagaattattgtgagaatcaatgcctcacatatttacatattgataaaattatactcatagaacactactggaaacaaagacagtattagttaaaatttagtgattactgcaaatattattactattacaaacaacatagtatagacattactactactatagttatcttaaaaatctaaaataaaaattttacataatagcctaatgtaatctctcctgctctgccctggctcagccctagtgctggctctgcccctagtcctactacatccctggccctgacccttccctggtccagccgctgccctggcccttcccatcttcaggccttaccacggccctaccctggtcctgaccctgccctggtctggtcctgaccctggccctaccccacagaaggggtatggcagagccagggaagggccagggcaaataagtgacaggacacatccaaatccaggaaagggccagggctatgacagagccagggcaagtccttggcagggccaggttccaggccagggccaggaaagggtcatggcagggtcactgtatggccaaggtccaggccaaagccaaggcagtggcagggtcagggctgcataagggcaggaccagagccagtgatacggcagggccagggccagggccagggctgtgccaggacagaacaagagcagagcagggcaggaccagagccaggccatagagagagtagggcaaatgccaaggcaaggccagggtagtgccagggctgaggcaaggtcagggaaggtccagggctgagtcaaggctagaaccaagacaggggcaaaggccggggcagatctagggcacaagcagagcaggctagggcagggcaatggcaagaccaggccatggcagggccagcccaggatagaagagggcacaggcagggcagggccagggccacagctggggcaggacaaggaccaggaccggggtccaggccagggcaagggtatggccagggcagaggtaggccagagccagggtctgggcaggaccaaggcaggtctgttgcagggccagggttcagaccagggccagagcagggctgggacagggccagggccagaaccaggaaagggcaatgtcaggacaagggccatggcaggaccagcaacggggctggggccaggacagggtcaggaccagggctgggccagggtatggccttaagtagcgaagggccagggccagggtccatgccagtgccagcgccggtccagggcagacgcagggccatggccaggtctaggacaaggctggggcagggccaaggtctgggtcagggtcagcacaagaccaggacagagccaggggagggacagggccatggtaagaccagattaaatcagggacaagacacctgcaaatccacttcagggccagggtcagggcagggccagttcagggccagggccagggccaagacagggccagggttagggctcccagggtcattggcagggccagggtcagggctgccagggtcattggcagggccagggccatggcaggaccagggtcaggagcaggggtcaatgccaggccaaggccacacataggaccaggtctgtgctagggccagtgtgagggccaaggcggggtcagggcagggccaaagggagggcagggccagggcagggtgatgcaggcccagggtagcacagggttaaggtagggcacgaccaaccagggcaggtctatggctggggccggggcagggccagggccagggcagggccagagccagggcagggccaagacagtggcagctccagggcagggccagggttaggaccacggacatgtccaaggccagtgccagggcaagggcaagggcaggggcagggccaggttcatctaagaaccagggacaaagccaggcccagagatgggccaggacaggtacctggcagggctagggtctgggccagggccacggcagggccagggccacaaccaggtctgtgctatagccaggtccaacacagtgcccaggtaaggctaggtagaaggccaaggtagggccagggcagggtcaaagccaggctagggccaaggcagggccagggctggcaaggcagggccaggaaagcatagggccaaggcagggcagggccaggccagtaccaagacctgggcagggccaggggcagggccaggggcagggccacggccacagcctaggcaggaccaggttcggggcaggagcaaaacaagggtaaggacagtgcaggttcttggcacagccagggtccaggacagtgtcagggcagggccaaggcagggtctgggccttgataagaccagcaacagggctggggctaggccagtgacaggaccagagtcagggcaagggccagagcagtgcaaggccagggtagggccaggcatttcagggtcagggccaggggagaaccagggcaaggtctgaagcagggaagggccagggccaggacaggtccagggcagggccatgacacggccaggggctgcgttagggcaagggcagggccagagcaaggtaagggtcagggccaaggccagggtagggacagggcaagaaatatggcaggaccaggggcaatgccaaggccaaggctgggccagggctgagccagggctgagtcagggcagggcaaggcagggcatggtatggccagtgcaggacaggacaagagccagtccagagagagagcagggctgatgccaagaaagagccaggctagtgccgaggctgaggcagtgtcagagcatgtccagggcagggccggggccagggacagaaccgagccagggcacagccaagacagggtagggcagggaaatagcatggctgggtcagtactgggacagggcagagcagggcaaggcgatggtagcggcagggcagggacaggccaatgcagagccatgtcatgccggggccaggacacctccaagtccacttcaggcccagggctatggcaggacaaagaccagggccaggatcagggccaggtctgtgctagggccagctccagatgagggtctagcgaagactagggtgagggccaaggtaaggccagggcagggtcaaaggcagagtagggccaggtcagggtgatgacacatccagagcacaacagggcagggtgatggcaagaccaggggcagaccactgccagctcagggccaaggaaaggccagtgcagagccaggaaagggtctgggtctgaacaaggcagagcagggccagggccatggcagagtcagggcaggtccttgacaggaccaggttccaggccagggctagggcagcagcaggggcagggcctggataagggcagggccagggatatggcaggaccagggctagggccagggccaggccatagtgagggcagggcaaaagccaaggcagggtcagggcaggtccagggcaggtccagggagcggccagcaccaagcggggccaaggcacaaccagcgcagggtaaggcaggacaatggcaccactgggccatgacagggcaaggtcagcaccaggagagggcagaacaggcaggcccatggtggggccagggcagggatgggccaaagcagggccaggacatgtccaaggccaggtcagggccagaacaggagcaggaccatgaccattggcagggccagtgccatgacaggaccagggtcaggacaaggggcagggccagagccagggccagaaccaaggtcaggccagtgcaggttcagggcagggccagtgccagggcaagaccagggcagggacagggtagcacagggccaagacagggtcaggatgggaccagagcaggacagggccgagagtccaggtaacagtagagcaggtatagggcaaggcagggcagtacagggccagatccatggcaggcgcagggcaaagccaggcccattgccaatgcaccagccctccctacaaggctcctaccacctggccactgctgcagcccgtccatcgctgtaagcctgaaccccaaccctggctgcagccacctgccctcctagtgcggccgctctcctaccgctctggcgcactgcaatctccgtcactgccacccacccgcagcgaggcaagccgtggtgtcgcaggctcaaggtgtctcctcctcctcctggcacggagcagctgggcaggcaaagccagaaaagcctagaggaagatgtgaggggtggaagggttagagcctcaacttgtcatgccagccactgggtggcaggggccagtttcagcaaaggcactcacacccaccctccaaagtccagcctctccttttggcccaagctggccgggaactggggtctggggtgggtgctggagatatcacagcacccagctccccactccacaggaaccattgggcccaccggggctgcactcctcggggagcaggagaagcagaaaaattcagacccagccagccctccgcacccaggtgccaattcctgttccggacgcctccacgcacagggccctgtcccccatggtgtccccaggggtgcctggcagcctctgaggcacagacccagagtgcacaggcccaggaaccacggtgggtgtgggggctctgccatgctcaggattcccacgcaaacgctgtgtgccctgccgcattccagtatgaccaagagtgggtcgccctctggagtgtggagtcagggagaggagaaccactccttccttggatgccaactctgttgaccgccgccagcagtgcagcccctgatagcaccgaactcgcccccgctccacggctagtcctgccctcaatagcgccccccacctccgtcccccaatgccgccagtagcgtatacccgataatgccctaacctgtcctcctccatgggcactgaagccccagaaagcgcccataacccaccctccctgctgtgggcagtgcagccctgtacagtgctaccaaccagtacccctaatgcaggcaatgacaccctggatagcgcccccaacccaccccacactgcgaaaggtgcagccctggatagcccctgtcctaccactctgttcatgctgcagtctctgtcaccaccaccagcaaccacagtgaggcaagccagtgggccgcaggctctagcatccagcagccaggcatggagcagctctcgctgatggccggctcctaccactctgaccatgctgctgtctgtctccatggccatcttctttcactacaaaggaataaaactaggtatcaataagaaaagtaattttggaaacaatacaatcacatggaagttaaacactaccctcctgaataaatgactagcaggtcaatgaagatactaagacagaaattcaaaaatttcatgaaacaaagggtaatgaaaacacagtataccaaaacttgttacgcagaaagccatacaaaggcagagatttacagctacaagtgcctaccatccaaacaaaagaaaaacttcaaataaacaatacatcttaaagaactagtaaagaacaaactaaaccgaaaataagaaaataaataagatcgtagcagaaacaaaattgaaataaaaaacacacaagattaaacgaaaagttggttttctggaaagctaaacaaaattgacaaacttttaaccaggctaagaaaagagacaagattcaaataaataaaatcaacagattaaaaaaaggagacattacaactaatacttcagaaattcaaaggatcataactggctattatatgccaataaattggaaagcctagtagaaattggcaaattcctagatgcatacaacctacttaggttaaacaatgaaaacatccaagaccagaacagattggtaacaagtaatgagattgaagccatcagaaaaagtctcccagtaaagaaaagcccaggaactgatgtcttcactgctgatggcttcacaccaaacaatttaaagacctagtacgaatcctgctcaaactattttgaaaaacaggagggaatacttccaaacttattctatgagaccattattactgtgataacaaaatcagacaaaagcatcaaagaaggaaactacaggccaggatctctaatattgatgcaaaaatcctcaacaaaataccagtgaatcaaattcagtaatacattaaagagataattcatcatgatcaagtgggatgtatccctgggatgcaagggtcactcaacatacaatgtgatacatcatatcaaccaaataaacgacaaaaacagtatgatcacgtcaactgaaaccgaaaaagcatttgatgaaattcaacatcccttcatgctataaatcctcaaagaaacgggcacagaagaaacataccgcaacataataaaaactacaggaaagacacccacagctagaatcatatggaatggggaaaaacggaaagcttttcctctaagatctggaacatgataaggatgccccctgtcaccactgttgtttaacatagtaccagaaatcctagctaaagcaatcagtacagcccctgatatggcccccaacccaccctgccccctaccaccagcagtgtcgcccccccgcaacagcacacccaacatacccaagccgccccgcctccccgcaccatgggcattacagcaccccatagcgccctcaacccgaaaccgccacccacccccccaccgcccacagccgcacagtgcagccccggatagcacacttagcccacctcactgttgccagcaatacagtctgggatagtgcccccaaccggctccccgccaaaggcagtgcagccccggtttgggcccccaaaccatccccccgtgcaggcagcacagccccagatagcacacccaaccagccacccaagacgggcagtgacgcctgagatagggctcccaaccggtcccaggccacccgcagtgcagcctggatagcgcgcttaccccaacgcctttctacgctctggctggctgcagtgtccatcgctgccaccaaccacaaacagggctgcaaacaggaaggattttattcaccgtcgatgcggccccgaggtgtcccaaagcgaggcagtgcccccaaggtctgtgcagagcagaacgcagctccgccctcgcggtgccaccggcccgcccgcccgggtctgtgctgaggagaacattgctctgccttcgctgtatctccgaagtctgtgcaaaggagaactcagctccgccctcgcaaaggcacacagcgccggcgtggcggagaggcggacagcggcggagaggcggacagcggcggagaggcggacagcggcggcgcggcggagaggcggacagcggcggagaggcgcacagcggcggcgcaggcgcggagaggcgcacagcggcggcgcaggcgcggagaggggcacagcggcggcgcaggcgcggagaggcgcacagcgcggcacagcgaggcgccggcccagactccactccccagctgtgaaagggtaagaactgagggtggctgagactcggggttgttcagggcggggtgggctctggacccagcaggcccggcacccaggtcagggctccaggggaggccaggtgggcgaaggccaagaaggggccggggctggtcaggaagggctcctggtaaccagagcactttgcgtgagccagcgtgggaggaaggtgggctggatgagctagggaggcgccgggaggggccttggcagaggcgaccccctccgtcagcccccaggccactgaaccctgggtagcgagaaccgacaggggaggctgcatacagaggagtggaggctccccggctttgggggctctgagtagaagcatctagggggtccctcaagaggcccccaaacgcctccccatggtgagaaaagaaagcgcagagaggggcacggctgtgatttcttttattgccccaaatgtacttcatcttggtagatttctattggctttaaaaatgtgtgtgttttgctgttggggagtggggtgttatacggatgtcagattttgctggttgactgttcagatcttttgtaaatccttgctccttttctgcctagtttcactctgtcacttacattagagtgcggtggcacgaacatgactcactgcagccttgacttcctagggtcaagtacttcccctggcttaacctcctgagtagctggtactataggtgtgtgccgccacacctggctaaatttaaaattttttggagagatgaggccttgctatgttgcccaggctcgaactcctggcctcgagctatcctttgtctttgcctcccagagttctgggattacaggcatgagccactgtgcccggcctctgcctagttttaacagttgctaagaggaggatgttgaagtagatgtcttcttggtgggttaatccttttgtcattaagcagttgttatggtcacttccttttcaccccattggtgaaggaggggtccctgccctaaagtgtaggagatggctgaacacgacacctggcgtggatggatgagattgacagcagtgttttagtcacatatacccacagctcagaggaggacactgcatgccacacagggtcagatgggcaccgcactctgtagcggagtgagggctgtgggctgaggaagcaggcaggcttgatagtaacaagagcacacaatgaccaatggttcccgagggggaatgcagttggcttgtttgaataaattcatgggctggcagacaggtgaagtgaagcttcttaggctgaggtgcaactgtttggctgataaaagaactagccaggtggggagcctttcctgttgggtggcagggtagggggtgtctggtagaaacaggaaaacccacggctaggcctttggggccctgtgaggctcaaagatgtcaaggcagcataggaaattttagatcttaaaattcagcgaagaccctctccagctctggtaaattattttgcttgaagtctacttcatgagatattaatatattcactcctgcttccttaaaaaattaatgatttcacaggatatctttctccattcttttactttcaacctacttaggtccttaagtgagtttgaagtttcttatgaacagtatttagttgggccatgtgtttattataggctctccatcaatctgtcttttggtttatttagaccatttacatttaaggtgcttatagttacataattgcttatgtctgatgtttttattatttgctttttcgtttcctttttctttccctccatcttgatctatttctgtataatgttgttgctcgtatctctttgtatagtcttaaagtgtttgctctggatgttacaatatgtgtattgtaatacagtagtctactggtaccagtatttaccacttcaaagtgtggaaacctgccttgcatttatgtctctttaccttttccacttgtataaatcactggcttgagtattaggtggtggtatagtttttgtttcagtcgtcaaatgtgattttaagaactgtggattgtctcgcgtatgtatccacatttctggtctttcctttgtccctcctcctatagtcccatattcatcccttctgcataagaactttctgtagccatttttttgttttgatttttttgttttaattttttgtattgtggaaatgacagaacatatttctgtagccactttttagcatttctaaattgaccagtgacaaattcctatattctcttcctctgagaatgtctttatttctctcttcatttctgaagggtagtttcatgggatatagaatttgcagcgaacagtttttttgtttggttggtttttttgtttggttgttttttttttaaacacttgaaaatgttgtgccacttccttctggcctccatggcatttgagttggcgtgtccctacaggcattctgccatttttggtctttgtttttagttttgaaagtttaattggtgttgctttcttttggtatactttgaggtttgctcagcttcttgaatctgtaagtttatatctttcaccaaatgtgggaagcctcaggaattagttatttgcatgctttcacagctctggtctcctatgggactcagataacataaatgcggggttatcgtcccacaggtccgtgcagctctgttcatttgttttcaggttattttctctctcttgtttagactgggtgaattctgttgatcaggtttcagcttctctgattctctcctctgtcgtctccacttttactcaatagggcccatccagttagtttttttaaaatttctgttactggattttatatttctgtaatttccatttgattcttcagtttctttgctgatgttttcagttctttgattgttgccataggatttgtagttgcttgttgaagcatttttatactgactgttataagtgatgagtcagatggttccaacatctgcctatgtaatttttttatttttgcaggcagtcctcctgtttaggtttagtctgtaggtcttggtctactttgtgggctgtgattccaatggcaatttaatttcagagccttcatggtgttattttggtctctttggcttatatgtatcactgggattctcccaccagtccctgttgttgcccacctgagggaacaggggagccgccctaggctgggccacctgctgcagctaggtgggtggggaatggtggttgtcttggtgtgtggagctggttttcttgttgtggggaagatctcctttgatctgcggggactgagtctgcctgggttgccttctattgctacgttgggagttgggaaactctgggcctgggtcaccttcctattggatgaggtccagggagacacctggccactatgcattccctagtcctagagtccctcagcagcctttttctgtccaccttttggaattctccattgatcctctcctgtctattatttctagagtttgggttacatttcttaggagggtataatgtgttatcttctctagaccagaaatccttagtggtggtttcgggttgtaactgtgctaaagggagaattggcgtatttgtgatgtcgggtctttcttttcaaatgaggacatatcattattcagtatataatatttacaacacctacttccttgggttgaagaatgtggttaaggcaaggaaagtacttaacacagtgcctggtgtggagagcacttacgagtgttggtagtgatgctattccttttgtcctttggtagcctattaaagcttttcttcttttttaaaaaaataaagttccggtgcacttcttgttaggtttattcctattttatccttttttgcttttattgcaaataggagcttcctatcttttataacgtctacctggttctttggcccttacgtgaaaatgttttaatagccttctaaacattgttctctcaaatgagttttaatttgcctctttcttttgttttcctttttttgagacagggtctcactctgtcacccaggctggagttcagtgacgcaattatggctcactgcaacctctgcctcctgggcccccaaagtgctgggtttacaggtgtgggccactgcacccagccttacttgtctgtttcttttaagagtgggaactataattgagcccagagctccaaaaacaaatgaagaaatgaatgagtgaataagctcttcccatgggtttggtgtggtttgggactctactcttaatctaaatgctatgttttatataatctaaaatttcccctaggtgtgttacacgattgtgttgtgttgaacttacattgagactccttttcacatgtgctggttatcagcgtgggacttttccattcactctttgaattattcgtttgggggacacagatagacctctgtgtctttcataaagagtgtccattggccggttgcagtgtctcatgcctgtaatcccagcactttgggaggctgaggagggcagatcacgaggtcaggagttcgagaccagcctggccaatatggtgaaatcccatctctactaaaaatacaaaaattagccaggcctggtggcgggtgcctataatcccagctgctcgggagactgaggcagtagaattgcttgaacctgggaggcagaggttgcagtgagctgagatcgtgccactgcactccagcttgagtgacagagtgagactccgtctccaaaaaaaaaaaaaacaaaaacaaaagagtgtccattatctatactagaaaaattgagattgggattttgacatgaagtgcggaaatgtggattgggtccatttagtttacctaaacagatgatgaaatactaactgttttacgaagcattccctagtgcaaagttttgcctgtgtttctagtgatgggaacagtgagaatcagacttggaacacggagcgcattgtgggcctgtcgtgggtggggccagcagcacatgcatgccgggctgacagagcagcctttgggtgttcttttcccagaggagctctacggtgactttgaagacttggaaacaggggacgtgcacaagggaaaatcgggccccgatactcaggtatgactttgtcgtagctggctgttcttggtcattgtgttctgagagaggcccgcattgagaaatgcaaatcttacttgtgatgtgtgaagattgcagactggatggatagattccttcctaaagtgtggggatgtggggaccaaagagaagctttcttatttacttgttaagttttggactacagttactaccgtttcttgccatagtcatttgccaagtccactgtgatttttcactcacagaagtcttagcttctcagacttacattcaaccattgccatcattctcctctttttaaatttaagtgtcatttaaaagaatgaaatccctgttctccctaatatttctttagaacagggtctgggagcatctgggtgagggacatgtctgttatttttattctagtttgtgttcccagccagcttaaggaatagcagctagttgtaatgcagatgtaacaatttcctgtagcagtaccatgttattcagagacaaaggttatgttgtgttttgttttgttttattgataatgataacagatttttgctaagatttttgtttaaatagaactttaaaaaatctaatgtttaaagaaaagaccttcataaacatacacaaaattttttcttctggaaatttaagaatgaagatgtagagaaacaaggaagaaattgaccctgacgaagaagaaagtgccaagaaaaagcatttggataagaagagaaaattgaaggagatgtttgatgtggaatatgatgaaggagaaagcacatattttgatgatcttaaaggagaaatgcagaaacaagcacaggtgagaaacctcagttcctctcagccccttgtcaagactatcacatagtgtaggaatccctgactttctttgggtccctgcttcctatcctgcttctgtgcctttcacttggactcctgggtagatgcatgtgagtgtgtttattcatgcagtgagctcattgtttctacagtcagaaggtcaccagaaaaagatccatacctattttgtaacaagaattaggaaaccgaaatgactgagacatggtctctacttttgagacttttacaatgtagcgatctgagatagtgtgttcatttcagtgcaagccaatgctgcctattccgatcgctgctccctgatttgaatggcaggtgatcagtggcccgtgtggcttatggacacaccagagctcccaggggaagtgctctgaaaacatcctggtcagagttcagaaggacatgtggagtataaggtcagatgcggagataagggagatggtgtggccctcctgcccaggggtgctgagcaggttgctggaggcggtgatctcactctgaaggagacagacacagaaacgtatgtacagttgatggtgagcatctgagttgcgtcttgttagtgaggccaggagtgcctgtgtaagctggaacagattaggtatatgatttgtgaaacggagtttcatcctacgtcttcatctagtcaaaggactgtttcctgattaggcattagcttagtggttgctagtctgtgttgacctttgaaaggcatgactaggctaactctgaagttgttgcttcacaccatttacaatttaaaattacctagagccttgtgggccattggaaaagactgaatgtttcactctgaaatgggagtccttggagggttttgaccagagaagagacattcaggtaatcagatcactctgccaagagatcagtccagtggcacaaaccagagggctggcagtggagatgagacagagtcaaacccggattgagtttatttggaagctgggtcagtaggatttcctggtggactgaatgtggggtgtgtaagaggaaatgagggtggcgactggaagttcctggaagggtgggttgttgcaggttagataggaaaccgtctgcagatgcagttttgggaagatgatgtttggttcggctgggtatcatgcagacaagcggagtgtcaagtctggagagacaggtctggccagggacttagatgtacagccctcagcatgtagatgccacttaactctgtgaggtggccggggagtgagtgcagagtgactgggaggagcaagactggcatgggcgagatggggcgattgcggccgtgaggcctgagcagtgcctaggagggagagggagaagcagtgtgagcatgcaggcacgcaggagtccagttgtacacggaggcgaagcactgttcagatcccgctgcagtgttaactacggtaaaggcagagttgaccactggaggagtccttcagcgtggaggccttcagcgatcttggcaagcaccaattttcgtggatgtaggagaatgggagcagaggaactggaggctgcaactgcggaaaacttttgtggggttttgctgcagagagaagcagagaaatgaagcagttgttggtggaagaaatggaatcaaaaggttttgagatagagaacagagggaagagctgttggaataaagtccaggaagagtggatggtgtctagtgagcaagtgatgtgtggccctgagtagaggcacgtacaaatcacctgtgcctgagctgcccttagaactttctgtgatcatggagatgcacgtctgtgcttcccaatattgtaacattggccgcaggttgatatggaccacttccagtgtgactagtgtgattgaggaactgcattttaaatattatgtaattgtaattaattttaatttaaatagccacacgtagctcctctataggccaggtcagagctctgataaggctggatatgggaggaaaccctggtagagggttgactgtagaggttcttttggttttggagtgaatcaggaaacagccatcagctgagtgaaggtgagggtggtggtgggtgtttgaagacaagggaaaagtgtgaaagaattgtttggagaggaaggaaagaagatgtggactggggatgtttccaatgttcgagcacgcagggctccacagttatctacatttgctgtcccttggagcaggagagaagaaaacggttgggacatattctgagcagactgtagaggtaaaatacgtagtttttttttgttttttgagatggaatctcgctctattgcccaggctggagtgcagtggcacgatcttgactcactgcaacctccatctcccaggttcaagcgattctctcacctctgcctcctgagtagttgggactacaggcacgcaccaccacacccagctgattttggtatttttagtagagccagggtttcaccatgttggcgaggctggtttcaaactcctgacctcatgtgatctgcccgccttggcctcccaaagtgctgggattacaggcatgagccactgtacctggccaaatatgtagtatttttaataggataaagcctacataattctgtccacagttcctttacttagaaattgctcatttgttcatgttaatgctatgtttattacagataacagcatacaggttttccccccccaccccgtcatgtacagctgaatcatgcagaatttgaagatcaagatgatgaagccagagttcagtatgagggttttcgacctgggatgtacgtctgcgttgagattgaaaatgttccctgtgaatttgtgtagaactttgacccccgttaccccattatcctgggtggcttgggcaacagcgagggaaatgttggatacgtgcaggtgggtccctttgctgcatatttggtgcctgaggctctgtggatttcccctccatcaatcatcttaccctctcatccccctcagatgcgtctgaagaaacatcgctggtataagaaaatcctcaagtcccgagatccaatcatattttctgtagggtggaggaggtttcagaccatcccgctctgttatatcgaagaccacaatggaagacaaaggcttctaaagtataccccacagcatgtgcatcgcggagcagccttttgggataaaatatgattacaataacttgcctattgctgagattaaaccttacaggctgcgttattttagctttgtgcttttcctttcataaaattccactcctaagatttttctcttttctgggagcagggaggtggtttggagtatatacgtaaatctatatccaaatctaaatgtccatatccagtatgttaaactagaatctaaaatttgtggtttgctatatttctttttttccttttcctttaagaccctatcactccacagggaactggtttcttggcaatacagtctgtcagtggcataatggtaactatcttggatgatttcttttacagattggttttgagaaatatatcctgaatgtggattactatgtacatgagactttaagttgaaaattactcatttttattaatataaagtaaatttccctttgcttttaatcttcgtacatccttttcagtagggtgtgggattagaggaggggaggtggaagaattataatggtacatttcctatttttgtgcatcttttgcatttatttatctaagcaagtacttaagcagtgctcaccatgtgctaagcactgtatgaggttgtgaggagccatcagagaccacccagacacaagactccctgcagctgtgctggggtagcagtctgttcactccattttcatttgaccagtcaggcagggcagggtttactggtcccatttaacagagaagaaagcagaataatgagcagatggaatcttccctggaggtccaaattttaatttcctaaacattgcaactgtatttttcttttccatttcgttccaaataaatcattatagtaaaattacattcctctgaaatcactctcaggaaagtactcaagtagccttttttttttctttcttttttttttttttttttgagacagagttgcactctgtcgtccaggctggagtgcagtggcacaatcttggctcgctgcaacctctgcctcctgggtttaagcggttctcctgcctcagcctcccgagtagctgggattacaggtgtgcaccatcatgccgagccaatttttgtatttttagtagagacaggatttccccatgttggccagactggtttcaaacttctgacctcaggtgatctacctgccttggcctcccaaagtgctgggattacaggtatgagccactgtgcccagcctcaagtcacccttgttagtttggcttaccaactttaaagttttggattgcttttgtcaagccactgggttgcaagttcagatggtctttcttgtttttcttagctaattgtaagtaaaattcactttggtaatttattgtgtcacatagaattgaagtttttctcttgctaatattattcctattttcaaattttggggttcctgttagcctgattttcggatagctgccacataagttgtccttgatctggataaatccataaaaattgtgaagaaattaaagctaactggttttccatataaaatttttaagaacacttcatttattaaggtctgtatatctatatattctcatatttataaatctccatattgtttgagaaaaggaatgaaatacctctaaaatatgggcctcatatttttagaaaagtgtttgaaatcttttataaacttcatattttgtttgctcctttatattctgtattacttaaatatgctcagaaaagcagtggtaaacagctatttaggaattgaggctgttactcctgacttccatgtgagactgccacagaactcatattgaaaatatgtcattttatccactaggttttgtttcctactttttaaatttgtgttaagaaagggaaaaaaatcacaagtttgtctaactcagtagaaaaatcgacaaagcatttgcagacaacttggcaagggtacagagaaacggatgtactgtttttcagtatttggggagggtggtttgagcagcatttattgacaatttcattagtggggatgtttctattgaaaacagggttaggaagtcataaaatgttcctgcaatataaggtaataataccaccagcgtttatcttactgttttcatgttctaagtgcatgcatctgagtaaaaggatctgggctgcagtccagtctgagagatgccagcaaaggcttcctaggccagttcagtccagtaaatccctcttcgatcttctcttccacacagacagcagtgatgagcatgcccatgaactcacatgattattttggggaaaatgaaagagttgtattctttttgaggtagtaattccactttcaggggcaaatacattttgattattttatcacccttcagtgagttgtttttgttctttaatcaaggatgtatgtttgaagtaagaagtaaagcataaagtatatgattttgtgtgtgtgtgtgtgtttttatcttgctgtacctgtagggaatgtttaattcagccttggaagtggccaaatttgaaggtgctgtgattcgaactgtcagtgggataagggggcagatcaagaaagcactctgagctccagaaggagctttccgggccagctttgaggataagctgctgatgagcggtgagtgtcttaagtagtgttcagggcagggtgttaccattcatgcttgacttctagccagtgtgacgagaggctggagtcaggtctccggagagttgagcagctccagccttagatctcccagtcttatgcggtatgcccattcgccttgtgtctgcagccccctggccacacccagtaacagttctgtgatctatgagaatagttcccttagcgacctttcccttcaaatactttgcagccaggtagagaagtttggagtgaaggttttgttctttgtttcttcgcaatatggatatgaatcttcttttgaaaatattaaagtaaattacctcttttcagatattgtcttcatgcaaacttggtatcctgtttccatcccagccttctgtaacccagtaacatctttgttgaaaccagtgggtgagaaagacacctggtcaggaacgcggaccacgggccaactcaggcttgcccatggtgtcagactaaaggcaaacaaggactctctgtataaggtactggtcgtgtgtgtgttagtggagatgaagcctgtgctctacagacagggagtcacacagacacttttctataatttcttacgtactttgaatgttcaagtataaagtctaacattaaatttgattgaacaattgtatgtttgtgggatattttggagtggaacaccaaaaaatggtaatagtggttctttctggattgaagacaaacttttcttttttaaaataaattttattttatatatttgaggttgacaacatgatcttaaaggatacatatagatagtaaactggttactatagtgaagcagattaacatagctaccatctcacatagttagatttttgtttgtgtgacaggaacagctaaaatctacttatttaacaaaaatcccaaagacaatatatttttattaactatagccctcatgatgtacactagatctctaacttgttcatcctacatgtctgctactttgtattattttaatgtacatctccccatttcctattggtcatttcctatttggcccatttttcaactgggttgtttttctgctattaagttgtaagagttctttactgatttttggatattaacactttatcacatatgtggtttgcaaatatttcttccagtctgttggttcccctttcattttgttggttgttcctttgctgtgcagaggctttttagtttgatgcagtcctccttgtttatgtttacatttgtagcctggcttgtggtgcgatatccaaaaaattattgctaaggccaatgtcaagaggctttccccctatgttttcttctaggagttttatggtttcaggtcttatttgggtctttggtcttgtatctgttttgagttgatttttgtgtatggtgtatgatcagggtccaattttattcttttgcatgcgaaaatcctattattgaagagactatcttttttaccattgtgttgtcttgtttgcccttgtcaaaaattagttgacagtatatgtttggatttatttcaaaggtctctgttctgttccattggtctatttttttgtttttatgccagcaccatactgttttgattactatagctttgtaatacaattttaaatcaagaggtgtgatgcctccaactttttctttcacagtaatccgttggctgtttgggattttttgtggttccataagagtttcaggattgttttttcttttcttttttttttttttgaggcgaagtctcactctgtcgcccaagctggagtgcagtggcataatctcggctcacggaaacctctgcctcctggattcaagcaattcttctgcctcagcctcccaggtagctgggactacaggcacatgccactatgcccggccaatttttgtagttttagtagagacagggtttcactctgttggccgggctggtctccaactcctgacctcgtgatccacccgctgcggtctcccaaagtgctggaattacaggcgtgagccactgtgcctggccaggattgttttattcggttctgtgaagaatgccatcagaactttgatgaggattgtgttaaatctgtatatttgctttgggtagcatgaacattttaacaatattaattctcctgatccataaacacgggatgtcttttcattcgttcatgtctaaatttctttcatcaatgttttatggttttcaagtgtacacatctctcaccttcttggttaaatttattcctaagtttttgtttttctttgatgctatcgtaaatgagattattttcttgattgcttcgtcagctacgttatttgtatatagaaatgcaactgatttttatatgttgagtttataccttgcagcttaactgaattgatttagtagttctcacagttttttgtggaatctttggagtttttttacgtaaaggatcttgtcatctgcaaatagagataattttacttatttaatttagttgcctttttttcctcatctgattgctcttgcaagtattctattgaataaaagtgatgaggctggccatccctatcttgtactcaatcttagtggaaaagctttagttgttccccactaactatgattagactgtgggtttttcataaatggtctttattgtgttgaggaactttccttctatacataaactattaagagttttatcaagaaacgttgctgaactttgttaaatgcttttactgcatcaattgaggtgaccatatcgttttatctttcattttgttaatgtgatatatcacattgattgatttacatattttaaatcagccttgcatgccagggataaatcccacttaaacacgatgtataatgtttttgatatgttgttgaattctatttgctaaaatttttttaggatgtttgcatcagtgtttaatttattggagaagttgacctgtagtttttgtttgtttggtgtgtgtgtgtgtgtgtgtgtgtgtgtgtgtgtgttttggtttggcttaggtattaaggtgatactggcctggtaaaatgtgtttggaattatttcctctcgctctgttttttcgaagagtttaagaagtaaactcccaggggatgggagtgactctggacatgggagtgacatgatagtgactctggaccctgcagtggtgggacacagcagcatctctgtctctgtgaggccaggcgcagcatcagcaaggaccccagaatggtggagcactactgtggcttgggccctcgggggcagggaccagtgcagcaactacttctctccctggggaggcaggtgcctgggcaactcagattctccagagctagtccagttccaaggaagcagggttctacagttgtttgtcctgaagggcaaggtaccccagttcagccaatgccgttttcctgggatatgggggtgccatgttggctcatccctggcaggtgtggctgctcagctcagccaagacactgattccctgtgaagcagggcagcgcttcagctctcatgcagtggggggtgtgactgctcagactggccaaggcactgattccctggaaagcagggcaccaagtcagctcaggctccaaggggcagggcgcaatggcagctgggaggggaggggcacagcagcatggccctgcaggtggggtgtatgctgtgatgtggacatcatttgttcccaccagccatttgaaatttcatccatttgaaatttgattccaaatgtggtggtgtgggaggtggggcctagtgggaggtatttgggtcacagggcagatcctttatgaatagattaatgccttttcatgggactggattagttaccaggagtggattgttatcagagtgagttcagcttcctagactctcgtgtttcctctcttgccatgtgagccccttgcatacacctgtttccccttccactttccctatgagatgaagcagcacaagaccctcgccagttgtgctgcccaatctcggacttttcagacacaagcagggtgagccaaataaaccttttttataaaataagttaccccgagtctcaagtattctgttacagccacactaaatggcctaagacagtgtaacagcggctcgggggtggtgggccactaggtgggtgtgatatagagcaacaaagcctgaggatggaagaagggtgcggtggcagctcaccctgggtgggacatgctcccgaagtggtccaggtccaggagggcacgttgcagcagcagctggtccatgggggtggggcacaatgtcagttccttctctgaggggagtgctggggctactgggcccctcttgcttccttatccctgcagggagacatcccctctgcttcaggctgatccctctgggggaatgggtggtgggggccagatgtttccttccctcctttatgtgaccgtcctggttttctgtgctctgctggatttctgctactccttgatgcactctggggctctcttttagtgactttcatcaaaatatagatgtttgctgctttggctgtctttgtcaggggatgagtgcaaggggctattgatcagccccttgctggcatcactccctcttaaacttttcactgggtactcttttgaactattttttcccccaccgtatacatgtattttttaaacgttaatgtgctaatttctactgaagcaatgtggatttttctgaaagttttaatgttttaataagctttttattgaaatgttaatgtccacacagaagagtgcccgaatcataagtgtgcatctagatgaactgtagcacaccaggctgccacgccctggaccaagcagtagcctcgccctgtggcctctcccaggcactgctgccccaacccacagaatagctactttcccagttcctgatgtagatttgttctgcctggttttgacttctataaaatacagcacattctgtttagcctggcttctttggttcagtattacagaacacatccatgttcttgtctatggcagacattgatttatcgtcattgttgagttccattatatgactgtgtcaccatttttccattgatgagtaaaatgatttcctatttttggctgttatcccacggccctgaacactaggtctggatatgggacttgcaggtatgcaggggcacacgcacttctgctggaggatccctgggtggggtggagactccagggcacctgtgctctgcttcagtatggagtagttggagtgtattgcttagaacaaaagagatgagacactaacactgtgtgtatattctaaatcatatatcagtgaagaaatgtgatgtttgcaacatcttctctggggatgctaaccccctaagtcattattaccatgcatgtaagcacctcacctagatctgcactccatctagcagtgagaaattccaccataatctacacaccataatatcatcaatgtgtctagaagtcagatcctctatgtgtgaaccaagacaatgcctggcaaacaagacagctgggctctcaggtctctgcaccatggggaggtgtgtaaggccattcttgaattactataaagaaatctctgagactggatgatttacaaagaaatttacaaagaaatgttgaattgactcacagttctgtgggctgtacaggaagcttggtgctggcatctgctccttttctgggatgcctcaaggagtttttactcacggcagaagatgaagtaggagcaggcatctcacatggcagaacaggagcaggatagagagtgggtaggaaaggtgtcacaaatttgaacaaccaaatcccatgaaaactcactatcataaggtgaaaaccaacccaagaaggatactctctcatgacccaagtacctcccacaaggtcccacttccaaccttgtgaattacatttcaacatgagatttagtttagcatccaaactataccattattcccctggtctctaaagtctcatgttcttctcacatggcaaaatacaataatgtcttcctaacaatccccaaaactcttaactcattccagcatcaactcagtcgaagtccacagttcagagtctcatttgagttaaggcaagtccctttcacctataggccagtaaaataaaaaacaagttatttacttccaaaatacactggtagtacagacattgggtaaatattcccattccaagagagaaaaaactgccataaaaaaagggctacagatgtcatggaagtttgaaaccccgcagggcattcattaaatgttaaagctccaaaataatctttttttgactccgtctcccacatccagggcacactgatgtaaagggcaagctaccaaggctgagggcagttctacccatttggctacgcagggttcggcccctgtggctactctcataggctgttaagtgcctgcagcttttccaggtgtaggatacaatctgccagtagatctaccattctggaatacagaggacagtgacctccttcccacacctccactaggcagtgccccagtggggactcggtctggggcctccaaccccacatttcccctccacactgacctagtagaggttctgtgggagggttctgcccccacaacaggcttctgccttagcacccaggcttttccatacatcctctgaaatctaggtggaggttgttgaggctccagcactcttgcattctgtactcctgcaggtttaacaccacatggaagcttccaaggcttaacatggcttttgctccccaaaactgtggcatagcattatctggagcctcttgagccaaggctggagctgaatcagccatgaggttgcacaggactgtggggccctaggccagacccagcaagccattcagttcacctaggcctcaggacctgtaatgtgagaggctgcctcagagatatctgaaatgcctttgaggtctttttcccattgtcttggctatcaacacttggctcctctttagttacgcaaatacctctagcaagtgattgtttcgcagcccacttggattcttttcaggaagaggggatgttattttctgccacatagtcaagctgaaaatttttcaatcttctatgctctgctttccttttaaatataaattccaaattaaagtcatttctttgatctcacatctgagtataggctgtagacacagccaggccacctcttgaactctttctgcctagaaatttcttctgccagatactctaaatgattgttctgaagttccaacttccacagattcctagaacatgaatagaattcagccaaactctttcctaaggcataacatgggagatacttgccccagttcccaataagttactcactttccgtctgagatgttgacagcctatgcttcattgttcctaacaccatcagcattttgatcacaaccatttaaccagtctctataaagtctgaagcattttctaatcttcctgttgtgaacccccaaaattggacacaagtctcagttaactcagaaagcttattttgccaaggttgaggaggcacatctgtgacacagcctcaggagatcctgatgacatgtgtccaagatggtaggggtacagcttggttttatgcattttaggcagacatgagacatcaatcaacatgtgtaagatgtacatcagttcagtctggaaaggtggaacagctccaggtgaaggcaggacaacttgaagtggggaaggggcttccagtcttagatagataagagacacatggttgcattcttttgagcttctgatgagcctctccaaaaggaggcaatcagatatgtgtttctctcagtgagcagaggggagactttcaatagactgggaggcaggtttgctctaagcagttcccaggttgagtggggtcccaagatttgttttcctttcacactgtcttctcctgagccccccaaacccttccaacctctggccatgactgagttccacagctgcttttgtactatcaggtatcttttagccatactttatttaccaattatctgtgttaggacattgttgcattgctacaaagaaatttgttgggaaatttacaaacaaaagaggttgaattggcttatggttctgcaggctgtacaagagtcatggtgcctccatttgcttggcttctgaggacacctcaaggggattttacttggtggaacatgaagtgggagcagacatctctcatggcagggtgggagcaagaaagagagtaaggcaggaggttccacacatctaaacaatcagatcttgcaagaactcactcactgtcatgaggacagcaccaagcctcgcggaatccgcttcaatgacccaaccacctcccaccaggtgccacatgcaacattggggattacgtttcaacaggagattgagagaggacacacatccacactatatcaggaggtgtgtgccttgcaaccatcaggggatgctgcaggactgccctatggtccctacacagctgcttagtaagaaccattcactccaaggaacctgtgccctgtgctcaatgatggggactcaggagctgtgtcctctctggcctggcagagtcccctaagcagagacctgtgtatggtctcggcaggtgcttcctcccagggccctcccgagggggaaaccaaaccttcctcctcctcagtctggagtgtgagctaagcttcagctccagggctcagggaggggctgggcagtccttggatggaaacatatttgcatgagcagcccctcctctggcagaggatggagaagaagaggagacctggggcagctcaggcccactgttagggctcaggggctgtgtccaccatggcctggactcttctccttctcgtgctcctctctcactgcacaggtagggaaagtccttataaactgagtctcagtgtccaacctacaccatcccctgtggctcagacctacaagaagctttaccctgggaactgccttatcacccatgatgtctgtgttttcaggttccctctcccagcctgtgctgactcagccatcttcccattctgcatcttctggagcatcagtcagactcacctgcatgctgagcagtggcttcagtgttggggacttctggataaggtggtaccaacaaaagccagggaaccctccccggtatctcctgtactaccactcagactccaataagggccaaggctctggagttcccagccgcttctctggatccaacgatgcatcagccaatgcagggattctgcgtatctctgggctccagcctgaggatgaggctgactattactgtggtacatggcacagcaactctaagactcacacagtgctccagacccatgaggaagtaagacaaaaccctcccctctactctcctggtctagtgaaatcacccctgctggtggctctgaccaaatctagctcagggggtgacatctgttgtctcatcgacagcactggagctcccacggagaagtaggtctaacaaagtcctaccttgctcgcatttcacaggcagacatcccttgctcaggggtaaaatctctcagtgttgacattgaagaaggcaagagggctgggttggggttcatctcagctcagagtctagaagtgactcagagatgctgctggtctgagagttttaatatgagccttgggatacaatacagggatgcagatgggaattgtattctctatgtcagtaacgaaccatcagtaattgaaaagtcaatacattgagaatagcataaagcatgaaatactttaggataagtatgacaaaaattgttgttttacacactagaagtcctaaaacattgtttagacgcaggtcttaaagaagacctgagtaaatgcacagataatccttttttttttttttttttttttgaggcagagtttcactcttgttgcccaggctggagtgcaatggcatgatcttggatctcggctcaccacaacctccacctcctgggttcaagcgattctcctgcctcagcctcccgagtagctgggattacaggcatgtgccaccacgcctggctaatttttgtatttttagtagagatggggtttctccatgttggtcaggctggtctcgaacacctgatctccggtgatctgcccgcctcggcctcctgaagtgctgggattactggcgtgagccaatgcgcccagcccagataacccttttttttttttttttttttgagcaggagtctcgctctgtcgcccaggatgcagtgcagtggcgcgatcttggctcactgcaacctctgcctcccggttgaagtgattctcctgcctcagcctccctagtagctgggactacaggcatgtgacaccatgcccggctaatttttttttttccttgtggcaacggggtttcaccgtgtttggtcttgatctcttgaccttgtgatccgcccaccttggcctctcaaactgctgggattacaggcatgagccaccgtgcctggccccagataaccctttttatgtgagagtgtagagaatgttgctgcagctggtgtgggatgggggatggctgggttgagactgtgttgtcacctgcagtgtacacctgaggtgacatggttctgaacatcactttccccattgaaggcccgagtgacctatcacttgcttctcaaaattcaggaactaggtgactctaggagagtgcacaggaagctttctgcatattctttcaagagatttcgaggtcactgactcttttttcaagacttaaacacaaaatccacatccatcattcttgcgtaaagagaccattcttttttttttgagatggagtctcgctctgttgcccaagctggagtgcagtggcatgatctcggctcactgcaagctctgtcttctgggttcatgcccttctcctgcctcagcctcccaagtagctgggactacaggcacccgccgccatgcccggctaattttttgtattttttagtggagatggggtttcaacatgttggccagaatggtcttgatctcttgacctcgtgatccacccgccttggcctcccaaagtgctgggattacaggtgtgagccactgcacccggcccaagatggggtttcatcatgttgacctggctggtctcaaactcccaacctcaagtgatccactcacttcagcctcccaaagtgctgggatgacaggcgtgagccacagtgcccggcctagtacattgtttaaatggtgcatgtaaaacctcatggtactacaactgcctggtgacagactcaccagagtaaataactatcctgctgttctccaaccacatgggattccccaaacaaagatttgttgagtccaagatgcatcatgccagaactcttgcagtcatacacataatttgtttcattttaataaatacggttatcttttttcttcagtttattgtttttaatgtatcatcttctaggtttcattacacatcaaagatgaataatttctctcatctttaggacatgctgaaaacactcattagtgattttgaacagtattatttcctaaacatcctagttggaatggttgatcctaaaagctaccatgtgtcaggctcacctgagtgcagactgtggtctaaacaagctaaagttttaattcttccatcttcaaatacggagcatatttgcttgttttgctctttagcaaaacactgcaaagtcattcgccaggatctcctgcagactggcattcagtgatggagaacagactcctaggtgagatccctggtcacaggatccagatgactatgactgcaagtctggaaaagaagagacagaacaaagatttaccagcataaccctctgagaatgtgccccagccatcctggagggaagagctccctattgacccagcactgcagaatccacagaggaaggacagctctggccaccagggagcagccacacgacaagagaggacccggtgtccccacaggtgaggaaatgagtccatggggctggtcagtgctctcgatttcattctgccataacaggactttgtgtagtcaccacctgagtcctatacagtgaacagccaaggagacatggacagattcacccctgaggaacccagtagaatgtgaagtctgccctgaggtcacgaagaaaagactcggggggctgcctggcctggccctgatggagggggccatggacagaacaacggggaggcaggggtgtctctgagaggctctggtcaccttgtcatacaatggtggtgtacaatgtcgcaccatggacactagggggcgcctgcgcaccattcctgagaagactgggtgtgatgagagcaggaccagcgccacctgtcctgcttggtgccctatgcttagggctcacagatgtcaactctccaccccctgggaccacacagccccacccctggcactctctgacatcctcaggcagaggagcttgacccagggcccagggtgggatcagaaagctggagggtctgatttgcatggatggaccctccttctctcagagtataaagaggggcagggagagacttggggaagctctgcttcagctgtgagcgcagaaggcaggactcgggacaatcttcatcatgacctgctcccctctcctcctcacccttctcattcactgcacaggtgcccagacacagggtcaggggaggggtccaggaagcccatgaggccctgctttctccttctctctctagaccaagaatcaccgtgtctgtgtctctcctgcttccagggtcctgggcccagtctgtgttgacgcagccgccctcagtgtctgcggccccaggacagaaggtcaccatctcctgctctggaagcagctccaacattgggaataattatgtatcctggtaccagcagctcccaggaacagcccccaaactcctcatttatgacaataataagcgaccctcagggattcctgaccgattctctggctccaagtctggcacgtcagccaccctgggcatcaccggactccagactggggacgaggccgattattactgcggaacatgggatagcagcctgagtgctggcacagtgctccagcccaatggggaactgagacaagaacccccttcttcctcccccaggagggtgagtgccgccagctgctgctcacgcctgacctgtagcttctgctgctgcaggttctcccatgggccacggggcagccagggccctgcctaggagtggaggctccaccacttttgtcctcagagtcaggaacagggactccaggaatgagaatatcctgctcctgcagcttgggacacagggtctctgcactgacatcctgggctgaggtggcaggtccagctgtgtcttcacagtccttcctgtgcctgcccatggtgtggggagggagggagtggggaagggggtgtgggcctttgagcttcactagagacctgagggagcagaggtgctccccaagacctggactccttccctcaccctcctcccatcactctcctcactgtagctatggccaggtgagggctcagggctacttgaggaccttgctcagcccagggcctccatcccaggcattgtttccaaactctgtaagggctgtctctgaatctgtagaaacagttatttctatgtgcccaggactgggttagagggcaccaaccccaccccttgcaaactgctcctcacctcttagcgccccagtgaggagaagaaagagttagaaatcaggaatctactcagggctcccctctctcccctttcccagcctcccctggctttctctttctacagaaacaccaaggaggcagccaccaaggacgaggggaggcccaggcattataccaggcagcggagccagccagtccccccagatggtggagggaggtggtggaggtgtctgggaccagaaaatagtgaggaccctcttactgaagtgaggacgggtggcataaactgaggcccagatggtggaccagatctcctgagccatctactcatttcttcgtgtgttccagtttgggtaagaataggctaaaaaaaaaaaaaaaaggctttgaagaggttcctttcctcagataagaattcgtagaggattattgcccactcaggcattgaggggaggctgagcctcactctcaggccaatagaactgggggctttcaagggaatttgattgtactgagctcccagactctgacatctaagatttttgccctcgtagccgaacccagcactgataccaaaatggatgaaggctgatagataagcctagaatattctagctggcaccatctcgtggaaaagagaatcaagttagaatattgatgtgataaggtggcatcgcacagtgaggggaggagagcttgcatgggggagggtagaggagccactagagggctggacaaggaggagacagtctgaggtaagtttgtgaggaaaactccagatgcttcagagaagatggacaaggaggtaggcagtgtgaaggccatgggaccagctctagtcaccgggagagagtggtcagattcagcaccagtgtctggggaggaggtactgaagcctgggtgaggggagaggctcaaggctggccttaggacctgagtggggcacagtgatcacactgctggggggtccttcaagtgcaagggggctgcaggaaggcttgagctcattgtcacaatgaaaacttagacaacagctccccagccttgttcaaaggtgtcacaggactttttcctctccacatggcaacgtggagaagaaaacttatctctgagatatataagatgttagttctccataacctctcttgtcccctggctgaattcctatttggaaacaaaatgactctccagttttatatatgacatcctcacaaaaaaaaagttccagaatgagaaagatctgccctccctgacccactggtgaggaatctcagccttcaggacaaccagactaaatcattcatgccatctcccatgacagcatcatgtggaccagggagcctaccttatgggtttgggccacacactgcctgtccctagcattgcagctggggacacttacatgctgaactcatggctgggagatctgaggtccagacatgacaggaaaaggaaaaagaccaggagctctgcctaagtagcccccctgtgtgaatcactctaccctccaccctcatcttcagttcgtgatgggtattgtcttgtgaaaactgaaagctgggctgggacacaggcaagagagtctctgactcacaaatctccatcgtgggctctctggcctttctgatattcttttcacacatcaattctgggccaagacacatccatgctcatcaagaaggcattgataggagaatcaggtagcctccagagagacaggaagcagataaacaccctcatgttggcctcctaagcccagaggagaaaaaaaaaagttggaggggaagaagttcaagaagccacactagaagccactgattaccatcacctcggcacctgtcctccatctgcccctctttcaagtgaggaccagactcaggggacagcacctgcacctccccctctgtccatgcactgtgtagggagcctccttctgctctcatctcaaggtggctgctccgccaggtcagccgtatcactgctgagagtcttccctgggtcctggtcacagggtctgggatcagcagcaacctggctttgattcagctctgaccctgccccttcaggacacaaagcccattattaaagggataactgaactctcctagttcactcaaccttagattttccttctcagtgtccttctagaaagtgccgcctctactaaatgatttcatgttatttcctcaggtctagagctatttgatttccaaaattctatactcttctgttctcattcccggtcatggctcattttccctcagcagctaatgatgctaatcatgtatctaccccccattgtcacaaaaaagagagatggaagagttccttagataaatacagggttagcaaagaaaagtttcattatctcttaagaattactccaagatctggccaggcgtggtggctcatgcctgtaatcctagcactttgggagtccaaggtagacaggtcacgagatcaggagatcgagaccatcctggctaacatggtgaaaacccatctctactaaaaatacaaaaaattagccaggcatggtggtgggcacttgtagtcccagctactgaggaggctgaggcaggagaacagcgtgaacccgggaagtggagcttgcagggagccgagatcatgtctctgcactccagcctgggcaacagagcgagactccgtctcaaaaaaaaaaaaataaagaattactccaagatctaagaaaattaattccagttcttcaagagtttactcctcagaaacaacagcatgaatacattaggtagtgaatgttcttggtcttctcaatgaataacgtctgaaaggttcagagtatatgtttcaaaaaggtaagtgcataactttcaaaaaaatgtagtattaacatgtcaacaattttaattggtatatatatttctgaaaaaaaagcagtatgatggtaaaagaaatgtaaaaaagcctttgtaaaacccagtgcttacagtccaccaggatagcacctgtgaagcaaatttcctttgctgaagatacaccgccttttagaataatagcaagatagtttgaatttgtcttcttctctcacagcaatctaaaaattaacttaatcccatttatatgacatatctagaaatattcctgtacatgtggacattcccatcgcacacctcccatccaggctgtcctaaagtggcatctcctcttcttctgctcatgttctccccctctcctcacctctcctgctgacacgtggctcctccctgccttcctctccagtagccccagcagatcaggcccaaccagtgaacaagctcctggacttcttggatttctgaggacttgccctgccagggtgtctttctcaatcacaatctctccttcccgggagtccaattctcctagatcctgttatttatctaatgttatacatctgtatctacttggtggacttccctacatcttcacccgaaccccaggaatcttcaggtcatgcccatatgaccttagttctcctggagtcccttcttccttcttcccctgtgatcccaccaagtggagatctcttctcagaccctggagtgcagcagggacttctctggtctctgccccagggattaagggggtggaattgaggactcctgtgcccttcctatgcctgtgttttcatcagggtcagctgcacaaggtagggattcccactctcagagtatgaagaggggcagggagagatttggggaagctctgcttcagctgtgggcacaggaggcagcactcaggacaatctccagcatggcctggtcttctctcctcctcactctcctcgctcactgcacaggtgactggatgcagatcgaggggagggtccctgggaagcctatggattcttgctttctcctcttgtctctagaagcagaatcatgatgcctgtgtctctcccacttccagggtcctgggcccagtctgtgctgacgcagccgccctcagtgtctggggccccagggcagagggtcaccatctcctgcactgggagcagctccaacattggggcgggttatgttgtacattggtaccagcagcttccaggaacagcccccaaactcctcatctatggtaacagcaatcggccctcaggggtccctgaccaattctctggctccaagtctggcacctcagcctccctggccatcactggactccagtctgaggatgaggctgattattactgcaaagcatgggataacagcctgaatgctcacacagtgctccaggcccagggggaggtgagagaagaacccccttcctcctctaccaggagggtgagcgctcagctgctactgctcaggcgtggcctgtggcttctgctgctgcagcttcccccatggtccaggggcatccagggccctgcctcagagtagaggcttctctttttttctgttctgagaatcatgcacagcagctccttcctaggaacagggcctccagggaccagaacatccatctctttgtaccttgggacacagggtctctgcagtgaagtcctgggctgaggtgtcaggtccaactgtcatcacaaacctgatgcagaacctgtgtctccatcaacctcatttcctgatttctggaagttccgactgttggctttctgtccctgctcctcagggtgaatcgcttggcttctttcctccccagcctactctttttaataaaaccctttccaaggaggaataatgtccatacgagaaaacacctatatttataatataccatgacacccattttggcatgtttctggatccttgaaagcatcaccaccaccgagctatgcaagctgtgaccaaccccagcagctcctcatgaccctttgtcatctccctttctaccccaatgccctcccgggaagccacagatcctcctctgtcattagtgtttggtttccattttctggaaggtatcagtgttcacaaacattctcttgccatttgttgaggcttctttcactccgcacactttttgagattctccctgttgttgctgaatgacatctcatcccataaagggctcatcagtacctttgagggcccctagccattttgcctttcatgcccattcctgcatttgtatatacacatatagaatccagggtagcctatattccttttaatctgaattttaaaaaatcaatacattttctggggcccctaacagcgtcgagtcctgtaggcatttgatcttctctctccagtgatgctcagccctacttgcatctcatgcgattatactcacttctcgccattattcaacaattttgttttattctcttggttttaaataggcaatacacaaacaagatgccacatgagaactatggaaaccacttccccctcctacatcctgtctcctggcctgttggtttctctcagctgaagtgaccaggaatgcttacatttatgttccctcccagccaggatctgtgtgtagaaacaagggggtctgtctgtgtctgtgtgggcaaccacattatgttttctttagtaccactacaaccttactattgacaaacaactttttaattcctgagactgtgacttcatgtaatcctgacagtagcccgattattgcttttgaggcagtggtcctgattggagaggaactgtttgtgacctggggatggcgttctctaatttatcaaatgtaaacactggaggtcagttaaatttgaattcggtaaaacaatgatgaagaatcaataggtaggctgggcgccgtggctcacaccttaaccctggcacttttggaagccaaggttgatggattgcttcaggccaggagttcgagacaagtctgacccacgtggtgaaaccccgtatctcctaaaaatacaaaaattagctgggcctcatgacatatacctgtaatcccagtgactcaggaggttgaggcatgagaatcacttgaacccaagaggcagaggttgcagtgagctgagaccgggccactaactccaggtggagtaacagagtgacactctgactcaaaaaaaaataccaaaaaaaaaaaaaaagagtcagtatgtgtatcccccagacaatattgtgtatttaaatataaacataactgggtgccctttaatttatctggcaactccacacagtgtcacaacctggaagaagcatagctggggcagtcatccccttactgatgctgggtctaggggcttaactacaaagacagagctttgctagcaaagatacactcaagtgagcacatcagtgagcatgaaatgcatgtgatataattcccaatgaatgatgcctcctcacttctctaattattctttctattatccttcaagtctgcagattcagggcctccccagggattgcttcagcctgagcgctagacaagtgatctcatgtcctgtcacacccagatgcatggggctactctgtccccacacagaggggcttcagcctggggtgcataagtaacatgtgagagagagaagagctcagcctggctctgcttatatctagtgagagaccaacttcgggttcatttgatgctggaggctggtgagctgagagcagaggagagaccaagccttagagtgcagggctttcaggagagaaattgggaacctggaaatgggccacactcttcagtgaggaagaagcaggcagctctaggcacagccctgcattcctagtggcttccccttcatcaagcttgactccctgctttgatgtctgtcagggaatctacttcagcaaggtgaagatcccagggctttactaaaaatagcagtagaccaggcaggtatgtcatggttcaagagttctgtgcacagaaataaatacagatgcatattcacaagggccctcacagttgtctcttttggagtggaagagatgaagaaaggcagggagaaattgaaagactcagtcggtctgggcctggggcagcactggatgctgtggacttatccctgaagggtctgcaggtgaccacagccaggaagccagcccctgctatgaccctgtgtcatctgctcactgctcactgagctcagcagctgtgtcctcacaggaaactgggtgcagccagcttggccttctccaccccacctggaaaatgtgggcaggtgactgtcagcattgagatcctatgaaggggctgggagacaagggaagagggctgatttgcatgaagcaatcattccacacccttatctttaaactatatcccattaatggaagctctggggccatccaaacctgatcaatctaagaggggttatcagctggaggtggtcagagtgaggaagaaactggcttccttgaaagactcatcaacacagccaccaactctgggacaaatggggtgactccctataactgtcacccgatattagccacaggagcctgagcctagtcccctcaccttattgcttctgattctggtccagtcccctgttgtccctggacccttgcctatgtctgagtccagggtggcaggggtagccccatctcagtcaacatctatagagaggtaagagctactacggcttcaagcagagtccacagttttacccatgagggcctcttttgctcccccaccctgtcacacaggtgactactgctgtgggtctggtggagtggcccctggcccctgaaggacacaaggtattccttcctctctaacaccaggcatatagtggagaaggtatgggtgggtatagaacagattggcttttctagatgcaaatcggtaagaccctggctacagaaaaattatttcacaaaaccccacaccctttcgtgacaaaaacactcagtgaattatgaatagaaggaaattacctcaacatagtaaaccctatgtatgaaactcccacagctaacatcacgtgcaatctgaaagactgaagatatttcctgtaacttcaggaacaaagcaaggatgcgcactttcaccacttctattccaaatagtattggaagacctagccagagcaattagccaagaaaaagaaataaacagaaaagaaattagaaatgaaaaagtaaaataatctctgttttcagatgacctaatcttatatgtagaaaatccataaaacttccaccaaaatagcaaactcttctcagctaagggaccatgttctaacccaatgaagggaagctaagaaccttgataaaaggttacaggaacagctaaatggaataatcagtttagagagaaacataaataacctgatggagctgaaaaacacagcagaagaacttcatgaagcatacacaagtatcaatagctgaaccaaaccagtggaagaaagtatatcagagactgaagatcaacttactgaaatgggtgtgaagacaagataaggcaaaaaagcaggaaaagaaatgaacaaagcctccaagaaatatgggactatgtgaaacgaccaaacttacaattgattggtgtacctgaaagtgacggggagaatggaaccacgttggaaaacacacttcaggatattatccaggagaaattccccaacctggcaagacaggccaacattcaaattcaggaaatacaaggaagatcactaagatactcctcgagaagagcaagccaaagacacataaccgtcagattcaccaaggttgaaatgaaggaaacaatgttaagtggatccagagagaaaggtcaggttacctacaaagggaagcccatcagactaacagcagatctctctgcggaaaccctacaagccagaagagagtgggagccaatattcaacttcttaaagaaaagaattttcagtccagaattttatatccagccaaactaagctacataagtgaaggagaaataaaattctttacagataagcaaatgctgaggtattttatcaccaccaggcctaccttacaagagctcctgaaggaagcactaaatatggaaaggaaaaactgctaccagccactgcaaaaacacaccaaaatataaagaccaatgatgctatgaagaaactgcatcaagtaatgtgcaaaataaccagttagcatcatgatgacaggataaaattcccacataataatattaattttaaatgtaaatgggccaaatgccccaattaaaagacacagactggcaaattgggtaaagagtcaagacccattggtgtggtatattcaggagacccatctcacatcaaaagacacacataggctcaaaataaaggaatggaggaatatttaccaagcaaatggaaagaaaaaaaaaagctggggtcgcaatcctagtctctgataaaacagactttaaacaaacaaggatcaaaaaagacaaagaaaggcattacataatggtaaagggatcaatgcaacaagaagaactaactatgctaaatatatatgcacccaatacaggagcacccagtttcataaaacaagttcttagagacctacaaagagacttaaactcccagatgataatactgggagactttgacactccactgtcaatattaaatcaatgagacagaaaatgaacaaggatatcccatccttagaaaaccccatcgtctcagccccaaaactccttaagctgatgagcaacttcagtaaagtctcaggatacaaaatcaatgtgaaaaattcacaagtatttctatgcatcagcaatagacaagcagaaagccaaatcatgagtgaactcccattcccaattgctacgaagaaaataaaatacctaggaatacaacttacaagggatgtgaaggacctcttcaaggagaactacaaaccattgctcaaggaaataagagagaacatgaactcagctctggaccaagtggacctatagatatctacagaaaactttaccccaaatcaatagaatatacattcttctcagtgccacataacatatattctaaaattgaccacataattggaagtaaaacatccttagcaaatgcgaaagaatggaaatcataacaaacagtctttcagactaccgagcaatcaaattagaactcaggatgaagaaacttactcaaaaccacacaactacacggaaattgaacaacctgctcctgaatgactactgggtaaataatgaaattaaggcagaaataaagaagttatttgaagccaatgagaacaaagagacaatgtaccagaatctctgggacacagctagaacagtgtgtagagggaaatttatagcactaaatgccacagcagaaagtgggaaagatctaaaattgacaccctaacatcacaattaaaggaagtttagaagcaagagcaaataaattcaaaagctagcagaagacaagaaataactaagatcggagcagagctgaaagagatagagacgtgaataacccttcaaaaaaatcaatgaatccaggagctggttttttgaaaagattaacaatctagatagaccactagctagactaataaataagaaagaagaatcaaatagatacaataaaaaagataaaggggatatcactactgatctcccagaaatgcgaactaccatcagagaatactacaaacacctctatgcaaataaactagaaaatctagaagaaaggatagattcctggacacatacaccctcccaagactaaatcaggaagaagctgaatccctgaatagaccaataacaagttctggtattgtggcagtaattaatagcctaccaaccaaaaaaagcccaggaccagacagattcacagctgaattataccagaggtacaaagaggagctgataccattccttctgaaaccattccaaagaatagaaaaagagagactcctctctaactcattttgtgaagctagcatcatcctgatatcaaaatctggcagagacacaacaaaaacagaaaattccgggccaatatctttgatgaacattgatgcgaaaatcctcaataaaatactggcaaactgaatccagcagcacatcaaaaaacttacccaccacaatcaagtcggcttcatcgctgggatgcaagtctggttcaacatacacaaatcaataaatgtaatccatcgcataaacagaactaaagacaaaaaccacatgattatctcaatagatgcagaaaagccctttgataaaattcaacatcccttcatgctaaaacctctcaataaactaagtgttgatggaacatatctcaaaataataagaggaatttatgaaaaacccatagccaacatcatactgaatgggcaaaagctggaagcattcactttgaaaaccaccacaagacaaggatgccctctctgaacacttctgttcaacatagcattggaagttctagccagggcaatcaggcaagagaaataaagcgtatttgaataggaagagaggaagtcaaattgtctctgtttgcagacgatatgactgtatagttagaaaacccaatcatctcagcccaaaaactccttaagctgataagcaactccagcaaagtcccaggatacaaaatcaatgtgcaaaaatcgcaagcattcctacacaccagaaatagacaagcagagagccaaatcatgagtgaaccctcattcacaattgctacaaagaaaataaaatgcctaggagtacaacttacagggacttgaaggacctcttcaaggagaactatacactactgctgaaggaaataagaaaggacacaaaggaatgaaaaaacattccattctcatggataggaagaatcaatatcgtgaaaatggccatattgcccaaagtaatctatagattcaatgctattcccatgaagacaccactgactttttctgcagaatagaaaaaagctactttaaatttcatatggaaccaagaaagaacctggataaccaagacaattctaaacaaaaagaacaaagctggaggcatcacaccacctgacttcaaattacactaccaggcaacagtaaccaaaacagcatggtactggtaccaaagcagataaatagatcaatggtacagagcagagacctgagaaataacaccacacatctacaaccatctgatctttgacaaacttgacaaaaacaagcaatggggaaaggattccctatttgataagtggtgctgggaaaactggtagccatagacagaaaacagaaactggaccgcttccttacaccgtatacaaaaattaactcaaaacggattaaagacttaaatgtaaaacccaaaaccataaaaaccctggaagaaaacctaggcaattccattcaggacacaggtgtgggcaaatactttatgatgaaaataccaaaagcgatggcaacaaaagctaaattgaaaatgggatctaatcaaactaaagaacttcggcagagtaaaagaaacaatcatcagagtaaacaggcaacctacagaatgggagaaaatttttgcaagctacccatttgacaaaggtctaatatttagaatctacaaggaacttaaacaaatttacaagaaataaacaaacaaccccatcaaaaaatggactaaggatatgaacaaacacttctcaaaagaagacatgtatgtggccaacaaacatatgaaaaacagcgcatcatcactggtcattagagaaatgcaaatcaaaaccacagtgaggtaccatctcacaccagttagaatggcaattattaaacagtcgggaaacaacagatgttggtgaggctgcggagaaattggaatgcttttacactgtcagtgggaatgtaaattagttcaaccattgtggaagacagtgtggcaattcctcaaggatctagaaccagaaataccatttgagaccagtaatcccattcctgggtatatacccaaaggattataaatcattctaccataaagacacatggacacatatgtttattgcagcactctatgcagtagcaacgacttggaaccaatccaaatggccatcaatgacagactgaatatagaaaatgtggcatatatacactgtggaatactatgcagccataaaaaagaatgagttcatgttctttgcagggacatagatgaagctggaagccatcattctcagcaaagtaacactgaaacagaaaatcaaacactgcatgttcatactcataagtgggagttgaagaatgagaacacgtggacacagggagggaaacatcgtataccagggcctgtccgggggggctgggggtcaaggggagggagagcattaggatgaatacctcatgcataccgggattaaaacctagatgacaggttgataggtgtagtaaaccaccatgtcacatatatacctctgtaacaaacctgcgggttctgcacacatgtatcccagaacttaaagtaaaataaacaaacaaataaataaataaataaataaataaataaaataagtcccaccaaaacaaaaactgttagaactattaaatacatttggtaatatttcagaatacaaaatcaacacataaaaccatctaatggacagccatgatggctcatacctgtaatcccagctcttggggaagctgaggtgaaaggattggttaggatcaagagagttcaataccagcgtgggaaatgaagtgagaccctgtctcaaaaacaaacaaacaaacgaacaagcaaacaaacagggttcttatatttctatacttaatcaaccaaacaggaaacaagaagacaggacacaacgcaaaatgaaattaagaaaacaattcaatttacaatagcatcagaaagaataaaatacttaagaatcaagaaggggactcttctatactgaaaactataaaacattgctaaaagaaattaaagaatacacaaataaatggaaagaaacattgctaaaagaaattaaagaatacacaaataaatggaaagaaaacatttgttcatgaattgaaaaacttgatattgttaagaaatcaatacaaaccaaaagaaatctacagattcatttcaatctctattaaaattccaataatttttttgcaaaagtagaaaaaattaattctaaaatttacatagactatcacaggactccaaatagccaaaatgatcttctaaaagaagaacagtgttggagatttcacacttcctgatttcaaaacatactacagagctacaccaatcaaagcagagtggtacagatagacagacacagagacaaatagaatagaattgagcacccagaaagaatctcttagttatatgatcaaatgattttaaataagggtagcaagaccattgagtggggaaaggacagactccataaaaaatgtttttgagaaaactggatatccacatgcaatgtggaaatggataaaagacccaaatggaaaagccataactgtaaaaatcttaatagaaaacactaggaagaagtttaacaacattgggtttggaaatgatttcttgtatttgacgccaaaagcacaagaaaaaaaaaagaaaaagaatatagataaattggatttcatcaaattgtaaaatttatgtgcaacaaaggactctatcaacagagggaaaatgcaaatcatggagtcagaaaatattttgcaaacattgtatctggtaaggtgtccaggatatagaaagaactcctacaactcaacaggaataaaaaaatagaaacaatctgaataaaacatgggcccaagacttgaatagatatttctccgaagaagatcaataaatggccaataagcacatgaaaagatgtttagcatcactaatcattagagaaatccaaatcaaaccacaataatacacaacttcacacccagtaggatggcgttaccaaaataatagaaaataacaagttctggcaaagatgagtagaaattgtggagaaactataaaatgatgcatccactgtggaagccttatggcagttcctcaaaaaattaaacatagaattaccattttaacagaattttcacttctgggtatgtgcctaaaagaattcagagcagggtctcaaagagaaatttgtacacccttgttcatagcagcattgttcacaatagctaaaaggtagaggcagcccaagtgtccatctaatggataaatgggatatagtatacacacacaagggaatagtattcagccttaaagagagtgttctggcccatgctgtggcacagataaacctgaaagacatcatgccagcagaaataagctggcttcaaaagaacaaaaattgtttcattacccttatatgaggtacctagagtagtaaaagctaccgtgacaagaagtataatgaagtttcccaggtccttggggtggagagtagggggagaatggacagttatttgttttttgtttagtttagttttgctttgttttgtttttgagactgagtctccctctgtcacccagtctggagtgcagtggcacaatcttggctcactgcaacctctgcctcctgggttcaagcgattctcatgcctcagcctcccaagtagctgggattacaggcatgcaccaccatgttcagctaacttttggtattttttagtagagatggggttttaccattttgctcaggctaatcttgaactcctgggctccagtgatccaccgaccttggcctctcaaagtgctgaaatcaaggaagtgagccaccacaccgagccgggcagttcttgtttaatggttgcgaagttttagtttgggaagatgaaaaatttctgaagatgaatggtagcagtgtgattgtacaagttgatttacttagtgacactgaagtgtacacatgaaatggtgaaggtaacaaattttatgtttgaatattttaccacagtcaaaaagaggaagatttatatttggcaccattgctctacttccaagaacagtagaaagatacagtagtaggagagtgtgcacaagtatccaggacgtctttcattttttgccagccctgcagcatcctaacaatccaagagagcaggaggtgtctcattacaggggactcagaataatgtgaagaaatctggggcggggtgggggcataatgatagcacacaggtgccggacccagtccaggagtggccacaaatgcaagggctgcagaagagggggagatgaagctggtggcagtggtagcagctgcttcagctggaaaggggcatctgttgctttccaaagtggttcacagttgaaatatctggcatagatacttcatcctgcctacctttcatgactaactatattttcattgcaatatatgcagtcatagtgagaatacctatttcctccagatacaagcaaacgtgaaggaaatgtgctttagtgctttggccaacttgacatggcagtcacaaaaagaggatgaatatccaaagacaaccttttccaaagataaggttattataccgtttattgtaaatactggaagtgcacaacaatcattcagacacctgggaaaatgacttgaccaaatacagttgtgaaaacaatgagtaaagaaagtgatatattcttggtaaaagaaccactggatctagtgagtaaagaaccaaaaggagatgaccctagattggaacttttagaccaggaccttggtaacattggtcctgtttatgcaacaaaaacaaagcaataccttgtctaccagtgagaatctgaatgagggaacagcaacaggaagcagcagaaaaaaggaaaagaagctcagtgcaaacagctgaatggggagatcacagggaccaccaagaaggcccagggttttctgctcagtgccttccctctcatacaccttagagcacccactgaacaaagataactaccagtatattctagctgagcctgatccccacgcccttggtcctcagaagcttgaacttgactgctgggcaaaattccttattcctggagacctctacagaggctgcttgtatgaacaggttttgttagcctgacataattgagctccccagttaaaagtctccaatgacctgctggctgactgtggttgaacagaaggtctactctatggtacgggattctcatgggttaccttgatatcaccatggatgagatgccaccagacactgctgccagactgggttggtcccagtctttagataactgtcaagcttccttagtttatgataagtttaactattcttgggagaattaaagggaatgaagttccaccagtccactggcaaacactactcttctagctatagacaaggagacatcctgggattttatatgaatcttcctgaagaaacaaagacagtcaagtcattgcctgatacttacaaagataaggccttgataaagtttaagaattatttgtgttttgaggaaaaagactttgtgactgaagcagagaagagcctaaaagagacttcccacagtgagataagattttataaaaatggtgttagtcaaggcatggcttacaaagatattttcaaggggctttactttccagcaatcttaccagaaaacaactgcataatttccatgaacattggactgtgcttcaagtatcctccaaaggatctcacttactgccctatgagtgacatgggctgggatgctctggtagagcacactctggctggtgtcttggtgctagaaatggattcaatcactggacaagaaagtccttcaggggcaaacataaggacactgagggtcatcttattctacctgccttctctccttacttgtatcctaggccagcctatgctagcgcaactgtccacagatctctctctctctttctgtctctctctcgtgtgtgtgtatgtgtgtgtgtgtgtgcatgtgtgtatcaaatgatcaaacatcttcattcaaaagtccaagccctgcagcatcatgagacagtgctaccacacatgaagaaaatgttcaaagggcaccaaatagagatcgcatgatccaaagttatttctgatcccagaaaagaatggcacacaatcaatatgaatagtattagatatcaaaattatagtacaatctcatttgtttttaccatagattcaaactctctttagcatattggaaagcagaatccatgttctactgatgcaattccccttgaccatcatgaaagaattggactgaaagcaggacatttctgaagtctctggaggatacgtaacatgactgttggagggaatgcacataggaagaggtagtgaattatgtgtcaagtgccccaacaaaaggctgtcagtgtttgtctctgacacattgttggggagaaaggtggagtcacaggacacactgccatgggacccacgagacttgatcctacatcccacagcgggcagcctgcatcaacgtggtcatgcagggatagaaacacagccacagaaagctttcacctgcccaagcagcatctcccaagagccagcatgggtgctgtctctgctctgcttcttcctggactgtgtctcagagccctgagttctccctcacccagtttcccaatccccctcttctccactggttaccaggggttaggggagtggggaggggaaataaacgtttaaagggtacaaacttttcacttgggatgatgagaaagttatggaaattcataatggtgatgactgtatcacttttttttcagaggtggtaacttgctctgttgcccaggctggagtgcagtggtacaatgatagctcactgcatccttgaactcttgggtctaggcaagcctcctgcctcagactcctgagtagctgggactacaggtgcaagccaccatgccaggcaattctatcacattgtgaatatacttaacaccactgaattttacagttaaaagtgatttaaatggcaaattttatgttgtgtgtattctatgacaattaaaaatacacttgttcaaatgtcaaaatatatatgatgttatattcataaaattttccttttcacacttatatatttatcctattctaactcattctcatcaattaaaaaagtactgtaattactggtcattatgtactaaattttccataattcacattgaagccttaacccccaatattactgtatttggagacagagcattacagagggtaattaagatgaaatgagatcataaggaccggcatccttataagaggagattagaaaatggacaacataaaatgagatgaggacagagtgagaaggtggtcatctacaagtgtggacacatcttcagtttgtgtggagtaacagttgaagggctcgcccatcctataatgaaagttggaacaggtgccttgggcgggctccaggattaactgatctagtcactgcatcccactgtgggaccccagagggaaagaagcactgtggagattcctgagacattagaaatggagcctgagaaatttccaggacacccacatgggctccaggtgaagcaggggcccagaaggccttgtctgagccctgagtgtgacgcagcacctggccactagggggaggcaaactctgtgaatcctaagggacctgagctcttgctctgagccctgcccttgttaatcaccagccctgggagggagccgatttgcatggaatgtgatgtccctgcccacttcttcactgagggaataagaggctttagggcctcaggctcagctgagagactgaagaacccagcattgcagcagctccaccatggcctgggctcctctgctcctcaccctcctcagtctcctcacaggtcagggtgggcagtgggctgggcccccaaagggacccccacctcccagcctccatctccccatccctgctcttcctcctccaacagctcatcagccacccaccaacaggagccctcatgggtgtctgtgtttccagggtccctctcccagcctgtgctgactcagccaccttctgcatcagcctccctgggagcctcggtcacactcacctgcaccctgagcagcggctacagtaattataaagtggactggtaccagcagagaccagggaagggcccccggtttgtgatgcgagtgggcactggtgggattgtgggatccaagggggatggcatccctgatcgcttctcagtcttgggctcaggcctgaatcggtacctgaccatcaagaacatccaggaagaagatgagagtgactaccactgtggggcagaccatggcagtgggagcaacttcgtgtaacccacagtgacacaggcagaggggaagtgagacaaaaacctcccggctgatctgctctgtccacacttccttcccactggcctgactcacatttcagagggctgtctcttaactctgtatttaaagttttcaccttcccagacattttggagttctaattcacagcatatgttccctgtgtgtaaatattttctcaagagcttttgaaacattgaagtttgcacaccaacatttgtggtttttgccactcacctgtcccctgatgggattgaagtttccaggttgtggaactgctcacaggtgcgtttatcaggaaatcaccgtcaccagctcccacgacctttgtccatattcaacatttgtgagctgcctattcaatgatgggaactgacaatttccctggagacacaaggccttcaccctgactcacagtgtcacataatcgacgtggacttcagccatctccagtcacctccatgtgcacagagctctcatggtacatgtgcttggctgccctagaaagagagaatggacacacaccaaagatagtagaatgtgagcctgctctatatctgagattctgaaagaggcccccactgccttcacagaatgaattccttcacatgcagggagagagctctggtggaatcactctgcaatgctttctgatgacaaatacctggattgaggtcaaatttcacaggttaataacccttttcaagactacctccactacagactccagttcccaggcattaagcctgaggacccttgtagacaaccaacatggggctgtgaccagcaggagcaatgggtaactgtcccaggccctgccttggggctgctcacagccgggtgagccccactggccacaggctggcagaggctgagctgctccctgtgctcgctgatgaaactcagcagcctagtgctctcagggtccagcaaagcctcttgggcagggtcctgtgcctgttcccaacagccgctccttcgaggaccctcctaggcccacactcgagcagctccttcctcaacctcctctgtcctcacatccccttttgggttcctgaatcagtgatcaggtagggtctcatttagccagaagggagggagtagatttgcatgaacagcttcttcttttccctgagggcagaaggaaaaatagtcaagcctggggaagcccagcccaactgtgaggtccagaggctgtgtccaccatggcttgttgcctgaactcctctggtacccaatccttggtctatgtttatagactcaatgaaaatacctccctttctactggcctcttaatgctaacagaatcattttgtcccctaagcacaaatagcctttcgggttgctgggtgggatgacaactagagcagaagtctagcatgtgcaaccccattcctggcccatacatgtccctgctcttggcccagtctttgctggttactccctgaactctgaaacttcagggaagttgagtttctctttctcttgagattgtactcttgaggagctcctgaatttccaggtatagggtgacccctcctcattaaggacatggctctcagacttatccctggtttacttccccaggtttaggtctgtgagttctaaacagtttccctatgtttctttggttgatattttggttgatatttccctttgtttctttaggttgatattacattgggtaattacattggttgattacattgggtaaatatattcttgtagatatacacattataaactcttcccccattaagctcttaataaataaacttgtttgggtgccaatgtaccaatgtaggtaagaagtcttgacgcttttttttttttcttctgcaggagcagaggagaacctgaaaaaaaaaagagagagagacaagttcagcttataatactgttattttcatataaactctcctactttaaaaagtacaaaactagacctatactgaaaatatttttaaatatatcagagtatctgcatctgtcactgtggagatggttgcttgctctaccacagagcacaataatactgagcctcatcttcagcctaggcccctgtgatggtgagggcagtcttgtcttcaagcacagagtgtgagaatcaagtggggaccccatgcagagatggggacgtcagacacacacaccctggctcagcctcacctcatgctcctaacatctccatcttcttcacacagaggctgctgctgcttctggctaacacgggctcctgacgctggttctccagggcccaagagaaagtggtcacatatattcttctaagctgcaaaatttgtatttttaacccaacatgttattataacaatgtgttcataaagcacaatactaagatctatcatcaattgcacagttatgagttatttataggagtggcaaaataaaaagttacgcacacacacacgcagattcgggcaggccagaatttaattacaggagcaaagtttgatattagtgacacaacataacaatgatcctatgtataatgataaacatagcaatggaccatatgaagctttgaagaaacatagtggaaacacagaaaaaatctccctctcaccaaattttagaaaattctaaaaaaaattaaaaatttttaaaacccctcaaaactgagttaatttataaaatatgatacaaaacataaagtttacataactttaacactcttcatactcagtaaatgcaggttctttctccacaatttaatccagtgtaccaaaaccgagccttcctgtttgctggaggaaaacctcagcaccacaacagtagaaaagcaccaacctctctgcccacagtgcatcttccctccagagactccgcaggactctgcatggtctcctgagggccctgaagtggaggttctgtgatgagaagggggcatggatggcacagggcaagaatgtctgcagggtaagagtgttagaaggacaagcttcattcctctctgaaacaagcctatcttacatgatttatctttattcttctctacaaaaaaaaaaaagtcacaaagatagctgcaaagaaatatgtgaaattatacaaggctaagataacaaagaatattggaagaaaaagtaattatgacatcttctatcgaaacattttaggccaagcgtggtggctcatgcctgtaatcccagcatgttgagaggccaaagcaagagaatcacttgaggtcaagagttcaagacaagcctgagatcccatttttattttttaaaagcagcattaaaaaaaaaaggttcatcatagtctcctcttcccacagttaataatgagaatggagaaagttcaaaaagtgaaaatttaagcaactcttatgtacccataacaattttttaaattttgaaaaagaaatgaaacccgtagcacaactgaccaccagcacacaggtgcctcttcttcagctgcccctcctgaagtgacaaccaaacccaggggctcagcacaatgagctctccctctggccatacattccctgtgaggccccatctactctcatcccaacacaattgctccccaggcatctggggactgctgctgagattctccactcatggggtcctgggcacagcggtgttatcccagtccccctcttcctctgtgtcctgggagctggaatcagagtcagcctgatctggcccaaagcctacaattaagagccctgagtggcctctcctgctttccccccacattggactcttcctttcagtgtccttcctggggtactgtgtcactactcaataatatcttatgtcctcagtgctaggcgtttttcacataatatactcttgttagtttctcctcacctttccaagctcagttatcaactctaggctgatgatcctaactattcatttacagcacattgtcatataaaggccagcgatatctagaaaaaaaagtgccaataaatgtgtgtactgcatcttacgaatcactacaaggataccacaaacaatatccctgtatttaaatagagttcactcttcagacacaagagtttaagtggagttcaatataatagtttatatagataatagttaatataacagtttaaccagtctgtctgtggctaaaccagtcaccatctcctgcactggaagcagcaacaataagggtcttgggcttgtgtcctggtaccaacaatgaccaggaagtgccaccaaacctctgatacatatgtacggatccatatatttatatccatatcctgcggcgaatatccacctgcagggatccaggactgaatctcaggctaccggtctggcaaggaggcattgctgagcatctctgggctacaggcttaggacaaggctgatctctgctgttggctttaggcagctccatcgaggtccccacagtgctgcagtctggggaactgagacaaaggcacaccaggtttccaatgagtatgagctacctgcagcaccacccactgtcaggacaactgggctctttaccgtttgtgtgtatgtttcctggtgctgccactaaccagtgcccaggactcaagtcagggacagtgatctagagaatgcagctttgttctttcagagccagcccacagagggagcccttagcaatggcacattgtcagactgcttcaaaagaatcagaaagcctttgattccaggaacaggctgctctggggacagacccgagatgggtcaggggaggcagggacagattccaggtggctctctctcaggcacatgcactaatgcagaggtctaatcatccctattgtctactgaacaactactatgtgccaggctatggggagggctcaggatacagagttaccaagacagacaaggttcctgtcttcatagggctgacaccaaactaaagagagacagtcaagaagtcaatgggaataaggcatattgtggtgtatcaaagaggtgacactggccagaagggggagaatgatagaacgcctttagtgggtcgtaagcaaggaagacacagccttttgtttgagatttaggaggaaagtccagcttcttcaaggaagacaaaaaatgaggggatagtgcgaaggcaaaaggtccagttagaaagcagtggcattgtgcacatgagagatgaggtatctagcatctgatgtagcagctgagctgggaggaatgtgcatgacccacaccatggtgagaaggactagaggaaagaggtcactaggttgaggccctgaccttgtccttgtgatggaaacctgacaacagcctgcagctgcgatcaagcatgtcactctcctcttctctctggaaagctcataggactcaggactcattgctgcccttccctcttattcagtgagatttatttgaaccatcacttttcacacctggacagagacctgcttactttctcttgagcaaaagcactaagggtcgggacagagcactgtagagcacatgggatgatgccctacacactcaaggggctgctgttactgctgttaaagctcacgatcaaacctcccagagctctgtcagaaaccatgagacgggaggtgtcagtgctgaagtagctgatttgggggcacactgatttgcagtctgtgcagtcctgatttggaggtgtgggacagtgagggctgaagcccagcatcggcaagaggttcctgaggtgtctttatgtgccagggtccttgtgaccacctcagtgatgtgtgggggtaaaggtcaattgaaaagctggagagcagtggacaggcaggattctgtgtctgggtgagggacgggatgttcagctcctgcccaggcatccttatttacatttctgtttacctctcttcttccttgtctccttcccagggcagggttccagggctgttgtatctccgctgctctttctccatcacaaagagagcaagagagacaggttatgtgatgactaattccctcttcacactcagttgtctgattgtccttaggaattcttcctgaggatgggaatgtgctgttttatttctcccttacagtgagatcctagccatttgtgaggccaaggagattgaccccatcctgtcgatgaaggattatttataacacacatggtcaaaaagaacatcatcaacttctgcacaagtcagtccattcgtcagggttatagaagtgcacgtctctcagctgtcagcaatgggcttcaaatccccaggatgactaacttgtcaggatgggatcatccacattaagatgtttctttacagttagtgactctattcactgtgtttcccctgctgagatccaacctctatgagattgtttattggctgttttctgtcttgttattgctgaaaacacttcctggcactaaggacagactcaatacatgtttattaaatatgtgagttcacctacattggaatcccaggaagaggtacaaacctgaggtcaagataataatttttttaaaaattctgaatattttgtgtttgagattccaagttcattcaatggaagatactaagtaatgacttttgcctttggatttggttagcaggagaaggatatggatataaaaatgcaaatatatatatcacacatacctccccatggcccagagacctgaaagcccagctggtctctgcagctgccaattgcagcctctgttcactcatttatggtctgattgtcatggatccatatatactggatcccatgggttcatgtggagaaagtggagaggatgcgatgggctttcccagtcctgataaaagaaaccacaggaagcgaatagatcataaagcaaattctggggacagaaaaccctcgagagcaaataaactgctaatatgggtgagttgggaaaatgtctggcaatatttatataactaagaaactttacattagatatccttccttcacaatattcattacggagctttaaatcatccatatgatcaatgcaattcaaacattaaactcatcaaccccaagtcccatagcagactttgatgaggaaattcttgaaggaagaagggtgggtttgtgagctctgtgtccacagaagagatatttctccactaggagaactgggtaaagccaataaataattaggaatgtagatgcccaactggactatattctaatccaatatgcaatgctgtgagtcctgcatctgcaaattgttaacattcattgtgcttccttcagtttcccaattactacaataaattaactttagacatggatgattacagaacagatcaattaatgtgagagtccttggaatgtgttgctttaatccacaaaaattacggaacacttcaaatgtatatatttgttaatttatgtaccaattgtattttactgcttcgttgatctgttgtaaaaatcacccagtgagggagtaagctgatgggtaaaatgggttgaaaaattaaacaagatgaaccacattgatgatggtcaaatttggctgatgggtgcaaacaattcattagaaaagtatctgtatatttgtatggttcaaaagtttccatgctatccagtgtttaaaatatccttgtttgtaactgttctgcttttaaccggtgtacaatgtggacaaaatgtaagcttacactctgactttgagtagaagcccatcttctcccaacaggcagaggagaagctggtgtggagaacatggaaaacacaggagctcagggtttcccaggacagagaagcgagtgagcctggagccctaaaagcaagggtggggctgtgagttgggctgtgggtgtgtgcaggggccacagtgtgaagggcatgcttcagaggccacaggatttggattttataataagaatgatgagttactgaaggggtttaagccaggtagtaccttccctgcctcatctatatgagagggatctgtatccaaatgcctggaggagagcgtgcctgagaaaagtgagtgatcctgattctagattattcactaaagcacctcgtgagtctagaaacccaagggccatttgcacagttagcacaagagtagacgtggcaacattgagaagtgatggtctctgcctttgtctcctctggcattcaatacttgcaaaaacactttgcaggtaaaataaatactgatatttcaaataacctgaaagcatccagtaaaaaaataaaggtggcaatatcaagatacaaacaaattgtataacatttaggacaaatcgtttaccaaaaaatatgacacgactgtgaagaaagtgacgttttacttagggagataatggctaacctcttaaaacagagatatatgtcacactgtgacaggaaagtctacaaaatctcttaatgttcctacatcacaaaattgagtcaaatctctataaaacatatgaaaccattagatgtataacttttgctaaattgctgtctttaacatgtattggatcatttatttttcctggaaaattctcattcttcactgtccttttgaacaaccccagctgcccttcaacccagctcctcagctgacccatttttcatgatgcccaccctgatggcacatgtgggcaactcgatttttctagaatgccatgcaggggtgctgacaactttaaaagttatatagtacatggctgcacatcccacagaccaagactacttctgggagtgagaaatcacagtaataatgcatagcatgatagaagcagtgtctgggaatcagaccatggatatgtgaatacagacagtgactggagagctgcagagaccagctgggttctgaagtctctgagctttgggaaagtgtgtttcctgggaccagcgtcggatgttgtggggctgccctgtggttctgacacagctgctcagtaaggagcattcactccaagaaatccaggccttgaggctgggccctgtgctcactgatggagacttggcagctgtgtcccctctggcctggcagagttccctgagcagggacctgtgtatggtctcaacaggtgcttcctcccagggccttgcaaaaagaaaagcaaaccttcctcctgctcagtctgcagagagagcagagctgcatccccaggtctcaaggaggggcccggcaatccctgggtggaaacacatttgcatgagcagcccctcctctgcaagggtgggaagaaaaggaggcctggggcagcccagtcccactgtggggtaagcggctgtgtccaccatggcctggaatcctctcctcctcctgttcctctctcactgcacaggtaggaaaaggcctcagagaccagggtcagccacacagcctgattctgactcttgtgtcaaagatcactaaaaaaaatattaccttggtttctgtcttaaagcctatatatgcctgtgttccaggttccctctcgcagcctgtgctgactcagccaacttccctctcagcatctcctggagcatcagccagactcacctgcaccttgcgcagtggcatcaatcttggtagctacaggatattctggtaccagcagaagccagagagccctccccggtatctcctgagctactactcagactcaagtaagcatcagggctctggagtccccagccgcttctctggatccaaagatgcttcgagcaatgcagggattttagtcatctctgggctccagtctgaggatgaggctgactattactgtatgatttggcacagcagtgcttcttacagtgacacacacagatggggaagtgggacaaaaacttcaccctgatctgggtcttgttctgtaacagtttttaaattttaaaataaccagccaagggacaaactaaatttggaaataactttctagttgtaaaaggctcttctctcaatttcccatccattcttctgaagtctcagtaaaacaaaaccaaaccaaagcacctgatgaccctgaagtgttggctggttgtccatatgtgctaacaccactgcctgcggagctggacttttgttcttgaaagaagcaaaatgaggctttcctagctcacatcatagtcagagcctggggacatcctagcaggtgaacagtcccctacagcatggactctgctcttccagcgtacaagcagagacctccccttccatccccactagtctgttctcagggctgtctgaggctcactgtgtcccaggaacaaggcactcaaatatgaaatgctgcctgaggacacaggtcagggaattccagatatagtgctgacctggctcagtcctgggtacctgcatttcagtggaaatgtcaggagatgggattacgtctgagggtaactgtggacctgaggccggtaaacctctatgtaggacatgagagagtcaaggggaggctccaccatggctgaggcaaggctgaggctgctccttggccatgggggaagtaggtcccagggatgtgactttcctgcagctcattccactcaggaccacggggactgctgagggtgggtttgctgatccctcagggcctgtgttctcttctcctctattgcaccattggaggttctcactgagtcaggttctagtagtgagtctgtggaacatctgggtacagatactgtttgcttcaagtgactcctccccaggaaactcttgagaaggcccccatctcaatgtcacctttttctgcatggggagcagcagaaacattgggcattccctcccagaaagagcccctaattttgtgacttaggacatcagcgattgtccctcaggggtccaagcctgattctcctgctctgggtttattcccacagcctcctggacaacttctgcgctccagcctgaggactggctggttatcagtgtcacacagctgcatcctgactccatgttaccaagggttcctattccatggggaaatgagagaaagatctgccccactcatcctctctgccccatccctcctttatccttgcctgtgaccaacaccagttcatgccaagacttttactgtcacttgtgttactgaaagcagagcaagggtgcagggatgataactccttttcttactggtctccccaatggaaacagaatcaacttgtttctagaagcaaaaggagctgcccacacatggtgggtgtggatgaggtggggatgacaagaaagaatccagccagtgtgacccagaagtccaggagccttcagcctggtcccacaggtgtcctctccttttggtgcaggtgtgctgatcatttcctgagctctgaatctgtgggaaagatgacaagaaaggagaatccagcctgtgtgacccaagacccatatgtgagagcggaagtctgacacttaagaaaacgtgggctcagcattctgagaggtctggatctggctcggcctagagctgctctagaagagaagcaagagaaatgctcagccttaggtggcccaggcacagtggtcctgtcaaaggtctgagctctctgcaacatggatatcctgcagagacatccttgggaggctgtgatcctagaatgatgtaaaaatgctaatggaagtgagcaggggatggtttatggaggaatgaggagatgggtgtggggtcagatgtggtaaggagggtgcaccctgaagaggagactgtccattgtgactcataggagaaggatgcccggggcctagggcagtgacaaaaagaggacctggaaggaccggcaccctgaagacacgtagagactggggtttggtttgtctgtgagggttcctgaggagaatcacataaaaaatccacagtcagtgtcttctgtccagggctcactgtcgcaactgttgccccttccttccagatcctctgggtgtccaggttccttagccgtggatctgctcctctctctgccctcagcctaagagctgatggggcatccaccaggaagcgcatccgtgggcagggaggaggccgtgggcagccttctcctgtatgtgagacactgctcagcctcggtgaccccctgttcattaaggtgggaggaaaggaaaacaaaattcactgtgaacatctatgcatcatcaaagaaaaagcaatgagaagaaacaggaagtgaagcccagctctaatagtttatttctacttggaaataaataaaacaatatgcctgatgtgttatataaacacaataaactttttataaaaactatgaaaattatgtaaaggagcatggcttacactaaaaggaacatttaaaataatgacacccttgaaatgcaatcccaaaacacagcatccattttatttcagttacatatacggactggttttatttaaatgcctgcaataaatctcactattttgttgtttaaatggagcatttaaaatctcattgtggccaggcgcggtggctcacgcctgtaatcccagcactttgggagtctgaggtgggctgatcacaaggtcaggagttggagaccagcctggccaacatggtgaaacccagtctctactaaaaaaatacaaaaattagccgggcatggtggcgcgtgctggtaattccagctacttggaaggctgaggcaggagaattgcttgaacctgggagatggaggttgcatttagctgagatggtgccactgcactccagcctgggcaacagaccaagactccggctcaaaataaataaataaataaacaaacaaataaataaaaaatctcattgtattgcaactgtctgatgatacattcacaagtataaatatcaacataaccatccagctgtttccctccatccacgtaaaattccccaaacaaatatttgttaagagtccagggtgtatcatgccagaactcatgcaatcataaacacaatctatttcatttttcattttgattaacagaattatcttttttcttaagattattgtttttagtttattagattctagatgtcattacagaccaaagatgaataattttcatcatcttcaagccacccccacaagactcactactgaatttgaaccataatttttccctggaaatcctagttggggtgctcgatgctaagagctatcacatatcaggctcacctgaggacagactctggtcgtcaaaccaagttaaaattttaattcttcccatgttcaaagactgaacatctttgctctttttgctcataagtgaaacactccaaagacatttgccaggatcccccacagactggcattcagtgcttggaggacagactcctaggcaagatccttggtcacagtatccggatgactatgactgcaaatctggggaagtagagggagaacaaagatttaccaggaaaaccctctgggaattcctccccagggcatcccagaggtaagagctccctttctcctcagcgcagcaggatccacagaggaagtggagccctggccaccagggaggagtcacatgagaggagaggacccggtgtccaacactggtggggaagtgagtccatggggccggtccccgctctgggcttgatcctgaaataaaaggactttgtgtagacatcacctgagtcctctacaatgtacagccaaagagccatagacagattcactcctgaggagtccagtagagcgtgaagactgccctgaggtcacaggagggagacacaggtgccaccttactgggccgggacttgggagcgggggcagtggccagaaaacagggcggggcggaggcagcggtgaatctcagaggctctggtcacctgatcacagaacggtttgccttagtctggacactagggggcgcttggggaccatttctgagaagacttggggtaatcagagcagaaccaggcacctgccctgcctgatgtcctctgctcagggctggcagctgtgtcctgtgtcctccccaccccctgggaccacaaagctccacccctgccacaccctgacatactcaagcccaggagcctgacccagggctcagggtggggtcaaaaaccggggggatctgatttgcatggatggactctccccctctcagagtatgaagagagggagagatctgggggaagctcagcttcagctgtggtagagaagacaggattcaggacaatctccagcatggccggcttccctctcctcctcaccctcctcactcactgtgcaggtgacaggatggggaccaagagaggggccctgggaagcccatggggccctgctttctcctcttgtctcctttcgtctcttgtcaatcaccatgtctgtgtctctctcacttccagggtcctgggcccagtctgtgctgactcagccaccctcagcgtctgggacccccgggcagagggtcaccatctcttgttctggaagcagctccaacatcggaagtaattatgtatactggtaccagcagctcccaggaacggcccccaaactcctcatctatagtaataatcagcggccctcaggggtccctgaccgattctctggctccaagtctggcacctcagcctccctggccatcagtgggctccggtccgaggatgaggctgattattactgtgcagcatgggatgacagcctgagtggtcccacagtgctccaggcccagggggaactgagacaagaacccccttcctcctctgtcaggagggtgagccccggcagctgctgctcaggcccggcctgtggcttctgctgctgtagcttcccccatgggtccaagggcatccagggccctgcctgagagtggaggctcctcctccccttcatcctcagagtcatgaacaggctgtccaggaaacagaacatcctgcttcctgcaacttgggacacagggtctctgcactgaagtcctggactgaggtggcaggtacagctgtgtcgtcacagacccacctctgatgggaaacctgtgtctctgtcatcctccttttcccatttccaggagtttccagagtggtgtcttcctccccctgctcctcagtgtgaatccctgtgcttcctttctctccagccaattctttttttaataaaactcctttcatgtaggaataatgcatatttaataaaccacccagatttataataggaaattagacaaatgttgacattttttgatccttgaatacatcaccaccaacacgcagctatgcaacctgtgaccaaccccagcaacccctcatgaccccttgtcatctccctccctcccttccccagtgctatcctgtgcagccacagatctgtctctgtcactattgtttgctttccattttttggaatgtatcagtgttatcagacattatcttcccatttgttctggcttttttcacactgcaaactccttttgggattcttcctgttctcgctgaattgcacccatcccatagagggctcattactacctttgagggcctttaggttgattattcctgattttgtttatttattttaaagtttgaatttatcgtccatcaaaatcaaactcttggagttatgttcatctaaggtgacaggagagtctgtgatgtcttgtcgggattcttgcttcttcatctcttgcctctcgttctgtctatattggaagaggttctcatattctatttatttacttatttatttatttgggtttttaaggatttcagtgtttttttctctttaattattaatttttttattttaataggtttttagggaatcggtggtatttggttacataaataagttctttagttgtgatttctaagatattggtgcactcatcacccaagtagcgtacagtgtacccagtgagtagtcttttatccctcaccccgcttctaccatttcctcccagtcctcaaagtccattgtatcattgttatgcctttgtgttctcatagcttatctcccacttatgggtgagaatatgccatgctttgttttcaattcctgagttactgcacttagaataacagtccccaattctatccaggttgctgggaatgccattattttgttcctttttatggctgcatagtattccatggtatgcatatatttaacatttcctttatccatttgttggtttatgggcatttgggctggttccatgttcttgcaattgcaaattgtgctgctataaacatgcgtgtgcaactatcttttttgaataatgatttctttttctctgggtacatgcctagtcccagattttgggactttgctggatcaaagggtacatctatttttagttccttaaggaatctgttttccatagtggttgtactagtttaccttcccaccaccagtgtaaaagtgttttgttttcaccacatccatgccaacatctattattggccattcttgcggtattaaggtggtattgtattgtagttttgattggtatttccctgatcattagtgatgctgttcatttttctttatgtctgttggccattcatatatcttcttttgagaatttttatttatgcctttagcctactttttgatgagattgtttagtttttttcttgataatttgtttgaattctttgtagatgctagcccttagtcattaggtggatatgtagattgtgaagattttcttccactcggtgggctgtctgttaactctgctgattatttcttttgctgtgaagaagctttttagtttaattaggtcccatctatttatctttgttcttgttgcatttgcttttgggttcttggtcatgaagtctttgcctaaaccaatgtctagaagggtttttctgatgttatcttctagaatttttattgtttcaggccttaggtttaagtctttgattcatcttgagttgatttttgtataagctgagagatgaggatccaggtttatttctttcacatttggcttgccaattatcccagcaccatttcttgaacagggtgtcctagagtatagtttgaagttaggtaacctgatgcctctggatatgctttttgttgttgttgttgtttgtttgttttttcttagtcttgctttggctatgcaggctcttttttggttccatatgaattttaggattgttttttctagttctgtgataaatgatgttggtattttgatgggaattgcattgaatttgtagattgcttttggtagtatgatcattttcacaatattgattctacccattcatgagcatgggatgtgtttttatttgtttgtgtcatctatgatttctttcagcagtgttttgtagttttctttgtagagttctttaatctccttggttaggtatattcctaagtatttttttttttgcagctatttgttaaaggggttgagttcttgatttgatattcagcttggtccctgttgttgtatttgtgtgccttaattttgtatcccgaaactttgctgaattcattcaccagttctcggagctttttgaatgagtctttaaagttttctaggtatacgatcttattataagcaaacaatgacagtttgacttcctctttaccaatttggatgcccttaatttctttctcttgtctgattgctctggctaagacttccagaactatgttgaacagaagtggtgaaagtgggcattcttgtcttgttccggttctcggaagaaatgcttttaagttttttctgttcagtataatgttggctgtgggtttgtaatagagggctttcattaccataaggtatgtctcttctatgccagttttgcagagggttttaatcatgaagtgatgatggattttatcaagtactttttctgcatcgattgagataatctgtgatttttgttcttaattctgtttatgtggtatattacatttattgactttgtatgttaaaccatccctgcatccttggtaagaaacccacttcatcatggtggactatgatttgatagctgttggattgggttagcaagtatttagtttaggatttttgcatctatgttcatcagggatattggtctgtagttttcttgttttgttatgtccttcccctcattttggttttagggtgacactggcttcatagaataatttattccctctttctccatcctgtgggttaatgtattagtattctccagagggaaagaactaatggaatatatatatatatatatatatatatatatatatatatatatatgagtttattaagtattaactcacataatcacaagtcacacaataggccatctgcagggtgaggagcaaggagagccagtccatgttccaaaactgaagagcttggagtccaatgttcaagggcaggaaggatccagcactggagaatgatgtagggtgggagactaagccaatctctctttcacatttttctgtctgcttatattctagccatgctggcatctgattagattgtgcacgcccaggttaagggcgggtctgcctatcccagcccacttactcaaatgttagtctctttggcaaaaccctcacagacacactgaggatcaatactttgtatccttcaatccaataaagttgacactcaatattaaccatcgcaattactgtcatagacttggtgccaattcttctttcaatgtctgatagaattcaaatgtgaatctgtctggtcctggacttttttcgggggttgactttttaaaattattatttcaatctcactgcttgttattggtctgttcagagtttctacatcttcctggtttaatctaggagggttgtatatattcagatatttatcaatcttctctaggtttttcagattatgtgcatattatcttttatatagtttttttgttttaattttatttagttctggtctaatctttgttatttcttttcttctgctgagtttgggtttgcattgttcttgatcctccagtttcatgaggtgtgaccttagaaggtctgtttgtgctctttcaggctttttgatgtatgtatttaatgctaaacttttcccttagcactgcctttgctgtatcctggaggttttgataggttgtatcaagatttagaactactgcaaccttactattgaccaacaggtttttaattcctaagagtgtgacctcactgaatcctgacaacagctttatgattgcttttcatgcagtaggccctggttagagaggggagtgcttgtggcctggaggtaggattctgcaatttatcaaataaaaacactggaggtcagttaaatttgaattcagtaaaacaatgacaaagaattagtatgtgttagtatctcccacacaatatttttcagttgaaatacaacttatctgggtgccctgtcgtttatctgccaactcctcacaggattcaaggcttggaagagggagtgttggggctggcctcgtcttactgatgccagttctatgagatgaacctcaaaggcagagcttctctaacacagctaccctcaagaaagcacgtcagttagcactaaatacatggtataagttcctcaatcaatagtgcctactcacttccctaattcttctttgtattattcttcaagtctgcagactcaggacctctgctggggttgctgcagccagagttctggatgagggacctcataagcctttcaaaaccagacgcagggggactactcagtccccacgcagcggggcttaagccaggggtaaataagtaagaaatggaagagctcagcatggctctccctttgtccagtgagacagcaaactccagggtccttttgatgctgaaggtgcgtgggctgagagtagggggagacccaccctgagagcccagaacttccaggacaggacttgtcagtctgaaaaggggccacactcttgagtggggaagaaggaggcatctctcgccacaggcctgcatttctggtggcttccccttcaccaaactgtgctctctgctctgatgtctatcagagaatctccttcagtgagactaagatcccaggactttactaaaaataacagcatgaaccagatagatttgtaatggtaccagaattctctgcagagcaatgagtacaaatgcagcttaacaaaggccctcacactcataactgaaaggctcagtaggtctgggtctggggcagtactgggtgctgtaggcttgtccttgaggcatctacaagtaagaacaactgggaagccatcctgctgtgaccctgtatcatctgctcactgctcactgggctcagcagctgtgtcctcacagggaaccaggttcagccaacctggccttctccaccccacctagaacatgtattccggtgactgtctggactgaggttctatgaagggactggcagacaagaagagggggctgatttgcatgaagaaaccattgcacaccctttcctttcatctaaaacccattaatggatactctggggccacccacagaagtctagcttgtctcctaaatttgagagttaggaaggagtcatttcttatcaatctacaggtagaggggccatcagcagcagagggccagagtgagggagaaactggcttcgagagactcatcaacacagccaccaactcttggacaaatggggcacttgctataacagtcaccccaagctactcacaggagcctgagcctagtcccctcaccttattgcttttgattctggtccatgcctctgttttccctggactctttgcccatgtctgagtccagggaggcaggggttgctccatctcagtcaaaatctatgtatatgtaacagctactatggcttggagcagagtccactgttgtacctatgagggcctatcctgctccaccatccccttacacaggtgacaactgctatgtttctgatggactgacccttttcccctggaagacacaaggtatttattcctttctaacacaaggcatatagtggagggggtaggggtgggtgtgaagcagagtggcttttccagatataatgcagtaaggccctggttacagaagatcatttcacaaaattccacaccctttcatgataaaaacactcaacaaactatgaatagaaggaaacttcctcaacatagtaaaggccatctatgaaaatcctacaactaacatcgcatgcaatctgaaagaccaaagatatgtttttgtaatatctatcaggatcaaagcaacaatgcacattttcaccacttctattaagacagtattggaagacctagccagagtaattaggcaagagaaagaaataaacagaataaaaattagaaataaaaagtaaaattatctctgttttcatttgatttaatgtcatatgtagaatacccttaaaagtcccacaaaagaaaactttgtcagaatgattaaatgtattcggtaatatttctgaatacaaaaatcaccatgtaaaattatctcatggctgggcatggtgactcatgcatataatcctaacactttgagaggctgaggtgggaggactgcttgtggtcaagagttcaagaacagcctgggcaacaaagcaaggccctgtctctacaaaaagagagagagagagatgaaagaagaaaggaaagaaagaaagacagaaagaaaggaggaaggaaaagaaagaaagaaagaaagaaagaaaagaaagaaggaaggaaggaagaaagaaagaaagaaagaaagaaagaaagaaagaaagaaagaaagaaagaaagaaagaaagaaaatctcttacatttcaatacttgagcaaataggaaacaacccaaaacaaaatcgggacccacacccattaggatggctttacccaaataatggaaaataataagttgtagcaaagatgtatagaaattataactgtaatgcattgctggagggactataaaatgatgcatccactgaggtggccttgatgacagttgctcagaaaactaaacatagaattaccattttatcagaattttcacttctgggcatgtgcctcaaagaattgaaagcaggatctcaaaattgtccacccttgttcgtagcagcatcattcacaatagctaaaaggtggaggcagcccaagtgtcatctaatggataaacggaatatagtatacacacacaagggaatagtattcaaccttaaaaagaaagttctgacccatgcgatggcatggatgaaccctaaagacatcatgccaacagaaataagctggtttcaaaaggacaaatgttgtctgtttgctcttatatgaggtacctagagtagtgaaatccatagagacaagaagtagaatgatgttttccaggcatgaaattttggtttgggaggatgaaaaattcctggagacgaatggtggtacgtgactgtacaacaatattactttacttaatgacactgaagcgtgtggttgaaaatggttaaaatatgtgttttgtgtttgaataatttaccactgtcaaaaacaaaaagatttatatttggtgcagttacaagaaccataaaaatatacaggactaggagagtgtgcctgagtagccaggacacccttccttctgtgccagccccacagcatcctaacagaccaatagagttggaggtacctcattacaggtgacacaaaataacatgagaaagtctgagaatggccatgatggtaggggtgggtgcctgacccagtccaggagcagcctctagtgcaactatggccaaagaaggggagatgaagctggtggcaatggtagcagcctctccagctggagagggacatctgctgtcctatgaaaatggctcatagttgatatatctggcaaagacatgtcatcctgtctacctttcatgaccaactacagttttcatagtgctttggttaagctggcatggcagtcccaaacacaggatgaatgctatagcatttattgataaatactgggagtgcatgatgaccattcagacacctgggaaaatgactaggctggataacatcgttaaaacaatgagtaaagagagagatttattcttggtaaaggacctcctggatccagggagtaaagacctgaaagaagattgcccaagatttggacttttggatcaggactttggtaaaactgatcctgtttatgacaagcaaaagcaaagcagtgccctgtctgtgagtgggaatctgaatggggcaactgaacaggaagcagcagaaaagaggaagaggagttcagtgcaaacagcaagatgagatctcagagaccaccaagaaggcccagagtgaccctttgttttctgctcagcgccttgccccttacaccttttaaaacacccatttaacaaggatggctactggtatattccaaccgagcctgagccacacacccttggtcctcagaaggttgaagactgctaggcaggagaaattattcctgaagacctctacggagcctgtttctgtgaacaggttttgttagtctaacatgattaagctctccaggtaaagatctccaatgaccagctggctgactgtggttggaaagaagggttactctatgatgcaggcctctcatggggtatggaaagggacctgggactttgaaatcatcaaggatgagttgtcaccagacaccactgccaatggggttggtctcagtcctaaggtaaccatcaatctcccttaggttatgataaacttagctattcttggcagagcaaaagggaaccaagttccacctgtccactggcaaataatactcttctagctacggatgaggacaggtcttgggattttatattaatcttcctgaaaacacagagacagccaagttattgcctgatacttacaaagataaggctttgataaaatacaagaattatttgtattttgaggaaaaagacattttggataaagcacagaagagcctaaaacagattctgcacaggcaaataatattttataaaaatggtgtcaattaatatgttgaataaaaggtatttttgagggggttgatttccagccatctcacaggaaaacaactgcatggtttgcattaactttggactgtgctgcgagtgtcctccaaaggatctcgcttactcccttatgagtgacatgggctgggatgctgtggtagagcacactctggctgatgtcttgtatctcctggagacagaagtggatggaggcacagtcctccatgggaaccctgaacaggtccctctttcttttcaaatatggactttctggggaatgatactggacggcttctgtagttgttgttgttttttgaactgtctcaaatgttttcccaaagatgctacagaacatagcctatccatttagcaagtgaaaaggctgaataagactgggagagactccctgctcatcatcattcttcttccacttccagtgactgctcatattctgtgccataagccaacagctactgatcccaagatcttgtaatccctctgtaaaactggtgctgtactgcataccttgccagctgggactttttatcttactgcattttccaggaataaataaccttgtcccaaaaacaaacatatttaaagacatttccttctgtggacactgattccatgctatctgttttccaaggaagtggtgagcccgtttctgagaacacctggtatcaatggctgtcccttccaaaccaagcaaaaagtgatttcttgtcggtgtggatttggttttgttattaattttaaaacatacctttgaagacttagatctctgaaactactagatctctagaagtgtaattgtgaaaaaagtttgcttgcatcatcaacaacatgaaaaactctttctaaataaaatttgttttgaagttaaaaaaaagaataatgcaagattggaaactgggaggtctgaagattcccaagagcactctcaattctgaagctaattttcagctcagggaccccaaacagcccttcacttcttatgagtccctagaaggactcacatgactcactgaaaactgtgacattcattaatgtgatttttctacagtgaaataatacagattaaaataattcaaggaaagagacacatgggcagagttcaggagaattccaagcacaagcatccatttgtcctctcccagtggagtaatagacaacgctgcattctgccggcaacaatgtgtgattctatgtaggaagcattgccaaccagcaaagctcacccaggcttggtgtccagaaaaattttgattggtggggtgggtgagagtggggttgttatgtagaccttgatgaccatcctcatggctcacttgagtttccactgaattgacaataaaacttcaatcttcaacctttggtcattttcttttaaaaaattttctaaagaaaattattttaaaaagtctcatataaacgagctgtttatccaatatgaggctcaacgcaaatagtttcaaaaagtcagtaggtcattaaaacaattatttagtcattcaaactaaatatttagtcattcaaacgttgttatctggtgttcagatagcaacgaacaccatgtagcactaaaatcgcattatagtcacaggggcaggatttcagcaacagcaagagaaagtaatacaaacaggaatgagcaaagaatagacaagtaatgggtatgaattggcctgggaaatattgtggcaatgtccaaagacaaatcaatagttatttgttaaagaagtgaaagacaacacattctcagtccaggaaagccaccagggggtggtctgggtctcttggattgtaagaagctcaagaggttcaaacttaatgaaccctgcacagatgctcactgactcatggaaatgttagagcagctgcttcctcccacaggacaaatccacagcacacagccaccctgggctggccccccacagtgtagctgctctcagggctgtggacccaggtggtgataaaggcagtaaagatttgcataaagcagcacacagcacaccccctccgtgcggagagctcaataggagataaagagccatcagaatccagccccagctctggcaccaggggtcccttccaatatcagcaccatggcctggactcctctctttctgttcctcctcacttgctgcccaggttaagagagatttcaaataccagcctttggagggatccctttttctccctttctaattcctaatatatgtctgttttttttgtttcagggtccaattcccaggctgtggtgactcaggagccctcactgactgtgtccccaggagggacagtcactctcacctgtggctccagcactggagctgtcaccagtggtcattatccctactggttccagcagaagcctggccaagcccccaggacactgatttatgatacaagcaacaaacactcctggacacctgcccggttctcaggctccctccttgggggcaaagctgccctgacccttttgggtgcgcagcctgaggatgaggctgagtattactgcttgctctcctatagtggtgctcggcacagtgacagacccatgagaggaaccaagacataaacctccctcggcccttgtgatgtggagatcacatgatcagacatgccagatcccaagatagcctacatgtggaccagccatagaaaggggaaggaaagggtttgaattgattcctatttctacttaagtcttgatgtgtaggaaatgtaagaatgatttgggagtaactggatcaaaaaaaaaaaaggaaaagttaattgttttctattctaaaaggaacactaacagcaggatcacatataaaggctgggtcaaaatgcatttcctccagaaagaagcatcttcagtgtataggctttctgagctaagagcaaagaaactttttttgcatattactgaagtttgttttattgagttactttcaaaccaatacctccagaaagaagcatcttcagtgtataggctttctgagctaagagcaaagagaagaaactctttttttgtatatgactaaaatttgctttattgatttactttcaaaccaatacatgcctattatataaaataaaaatattaaaaaccaccaagttcactgcaaagctgtctcatcagaaacaatccaatttcttcatttggatgcattctttcatttttgttctcaatatttccacaatgggggtcataccttgtgctttttctctctggttttacacatctttatgcctcctcccacaccctgtgcctctctcctgactctcagggtcctgggcagtcagggctcacttggtagcctgcacagtctgtctgtgacaaaaccagtcaccatctcctgcactggaatcagcagcaataaggttcttggaattgtgtcctggtaccaacaatgacaaggaagtgcctccaaacttctgatgtatagaagcaaatatctgcctgcagggacccaggatggatgctcgggctaccagtttggcaaggaggccttcccaagcatctctgggctccaggctgaggacaacgctgatctcaactgttggcttcagacagccccctggaggcccaaacagtgctgcagtctgggggagtgagacaggaacatgtcaggtctcctaggagcacgacctaactacagcaccatacaaccaggacagcagggctgtttaccatttgtgtgcatgtttgctggtgcttctgctaaccaggacccagggctcagattagggacagtgatctagagaatgctgctttgttttctcagggccagacttcagagagagcccttggccacagcattgtcagactgcctcagaagaatcagaaagtccttgatttctggaacaggctgccctgggaatacagccatgataggccagggcaagcagggacagaatccagctgggtctgtctcaggcatgtgcactaataaagatctctgtttgtccttattgtttactgaatacctactatgtgccaggctcaggtctcatgctaaggatacagaggtgagaagacagacagggattctgtcttcacaggactgacaccatgcagaaaagtgagggccaacaagtcaataggagtaaggcatattgtggtgtatccaagaggtgacactggccagaagggggagagcaataggaagcccttagggagttgtaagcaaggaagacacggagtctgatgggagacttaggagaaaagtccagcttctccaaagaagatgaaaaaggaggggagagagtgaaagtggagggtctaattaggagacggtagctttctccacatgagagatgaggtctccagcaagtgatgaagcagctgaggtggtgaaatatgcgtgacccacaccatggtgagtaagaccaaaggaaagaggtcactaggttgaggcccaaagcttgttcctgtgatataaacctgacaacatcctcttgccgttactgagtgtctcacacaccttttttctttggatatctcctgggactcaggactcattgctgcccttccctcgtattcagtgagattcatttcgaacatcacttttcacacccagagagagacctggctcctttgtatggagcaaaagcactgagggtcaggacagaacattctacagaacatgggatgatgccttacacactaaaggactgctgttaaagctcgtgatcaaacctccctggagctacatcagaaaccacgagaggggaggtgtcagcgcttaggtgcctgatttcagggcacactaatttgcagtttgtccagctccctcccaggcatttttatccacccctctctttacctcctttcatccttgcctccttctcagggcgggcctccaggcctgtggtgtctctgctgctctgtctccatcacaaacagagcagtagggagattatctgataatgaagttccctcctcatactcagttatctggttccccttaggaattcttctgcatcatgggaatgttctgttttatttctgccctacagtaggaacccagccatttgtgaggccaaggagattgacctctttccgttgaagcaggattatatttaacacatgtattcaaataacatcatcaacttatgaacaagtcaatccattcttcagaattatagaaatgcatgtctctcagctgtcagcaattggcctcagatccctagattggcgaacttgtcagggtggggtcagccacatgaagatgtttctttatagttagtgactctattcactgggtttcccctgttgagatccaacctccatgagactgtttatttttgttgttgttttctgtcttgtcattgcccaaaatgctgcctggcactaaggaaagacttaatacatgtttattaaatatgtgagttcacctacattggaatcccaaaaagaggtacagatctgaggtcaagttaataatttttaaaaaaattctggatattttgtgtttgagattccaagttcattcaatagaagatattaagtatgaagttttgcctttggatttggttagcaggagaaggatatggatatgaaaatacaaatggatcacacatacctccccatggcccagagtcttgagtgcctagctgctctctgcagctcctaatcacagcctctgttcactcatttatggtctgattcccatggatccatacatgctggatcccatgggcttatgtggagaaagtggagagaaggtgatggccctgctaaaaaaaccacaggaagcaagttgataatgaagcaaattctgggcacaaaatctctcaagagcaaataaactgcagaatatgggtgagttgggaaaatttctggcaatatttatataactaagaaggtttacattacatatacttcaacaaaatattaattctaaagcttccaataagtcatatgatcaatgcaattcaaacattaaactcatcagtcccaagtcccataatagactttgatggagaaattcttgaaggaagaatgatgggtttgtgagctctgtgtccacagaagagatatttctgcactaggaggactgggtaaagccattaaataattatgaatgtagtgcccatctggacttttttctaatccaatatgcaatgctgtgggctctgcctttgcaaatcgtagcattcattgtacttcctccagtctcccaattattacaataaattaattttaaacatgaatgattaaaagacaaatctattaatgttagagtccttggaatctgttgctttaatgcacaagaattatggaacacttcaaatgtatatatttgttaatttatgtaccaatgataaaatactgcttccttgatctgttctaaaaatcacctagaaagggagtaagttgatgggtaaaatgggttgaaaaattaaacaagatgaaccatattgatgatggtcaaagttggctgattggtgcaaacaattcatcagaaaattctctgtatatttgtatgactcaaacgtttccatgctaaccagtgaaaatatccttttttgcaatgagatgtttatgttctgcttttaccaggtgtacaatgtggacaaaatgtaagcttacactttgacttcaagtggaagcccatcttctcccaacaggcagaggagaagctggtgtggagaacatggaaaacacaggagctcagggtttcccaggacagagaagtgagtgagcctggagccctaaaagcaagggcaggggctgtgagttgggctgtgggggtgttctggggccacaatgtgaagggcatgttgctgaggtctcagggttcaggtttcataataacaacgaggagttactcaaggggcttaaaccagggagtgccctgcctgccctatctgagtgacagggatctctctgaatgccttgagaagagagtgtctgagaaaagtgagtgatcctgattctagattattcgctaaagcacctcgtgagtctagaaactcaggggccatttgcacagttagcacaagagtagatgtggctaaattgagaagtgatggtctctgcttttgtctcctgagacatccaactcatttgcaagagaattttgcaggtaaaatacatactgatctttctaataaactgaaaacacctagtaaaaaaatacacgtggtaatagcacaatgcaatttgtataacagctagaacaaattcttgaccaaaaaatatgatgcaactgtgcagaaaatgacgttttacttagggagataatggctaatttcataaaatagtgaaatatgtcacactgttcactggtaaaggtaagtctagcaaatctattagttttcctgtatcacaaaatcgaatcaaatctctttaaaacgtatgaaaccattgtaaatataacttgtgttgcattgctgtctttttttttttttttttttttttttagacagaatctcgctttgtcgcccaggctggggtgcagtggcccaatatcagctcactgcaagctccacctcccgggttcccgggttcacgccattctcctgcatcagcctcccgagtagctgggactacaggcgcctgccaccacgcccagctaatatgttgtatttttagtagagacggggtttcaccgcgttagccaggatggtcttgatctactgacctcgtgatccgcccgccttggcttcccaaaggaattgctgcctttaacatgtcattgatcctttatttttcctggaaatttttcattattcaccatctttttgaacaaccccagctgcccttcaacccagctcctcagctgaccccttttccatgatgcccactctgatgacatatgtgggcaaatagatttttctaaaatgccctgttggggtgctgacacctataaaagttatgtatgtacaggtctgcacatcccacagaccaagactacttctgggagtgagaaatcgtagtaataatgcatagcatgatagaagcagtgtctgggaatcagaccatggatatgtgaatacagacagtgactaaagagctgcagagaccagctgggttctgaagtctctgagctttgggaaagtgtgtttcctgggaccagcgtcagatgttgtggggctgccctgtggttccgacacagctgctcagtaatgagcattcactcagagaaatccaggccttgaggctgggccctgtgctcactgatggacactcggcagctgtgtcccctctggcctggcagagttccctgagcagggacctgtgtatggtctcaacaggtgcttcctcccagggccttgcaaaaagaaaagcaagccttcctcctgctcagtctgcagagagagctgagctgcatccccaggtctcaaggaggggcccggcagtccctgggcggaaacacatttgcatgagcaacccctcctctgcaacagtgggaagaaaaggaggcctggggcagcccagtcccactgcgggggtaagaggttgtgtccaccatggcctggactcctctcctcctcctgttcctctctcactgcacaggtaggaatagacttcagagaccagggtcagccacccagcctgattctgactcttctggcaaagatccctgaaaaactttaccctggtttctgccttagcacccattaatgtctgtgtttccaggttccctctcgcaggctgtgctgactcagccgtcttccctctctgcatctcctggagcatcagccagtctcacctgcaccttgcgcagtggcatcaatgttggtacctacaggatatactggtaccagcagaagccagggagtcctccccagtatctcctgaggtacaaatcagactcagataagcagcagggctctggagtccccagccgcttctctggatccaaagatgcttcggccaatgcagggattttactcatctctgggctccagtctgaggatgaggctgactattactgtatgatttggcacagcagcgcttctcacagtgacacacacagatggggaagtgggacaaaaacctcaccctgctctgggtcttgctctgtaccaatttttaaattttaaaataactggcctaggcacaaactatatttggaagtactttctagttgtaaaaggctcttctctcaattttctatccatttttctgaagtctcagtaaaacaaaacaaaacaaaacaaaaccacctgatgaccctgaagtgttggctggttgtccacatgtgctaacaccagtgcctgtggagctggacgtttttttcttgaaagaagcaaaatgaggctttcctagctcacatcatggtcagagcctggggacaacatagcaggtgaacagtgccctgcagcatggactctgctcttccagcgtacgggcagagacctccccttccatccccagtagtctgttctcagggctgtctgaggctcactgtgtcccaggaacaaggcactcaaatatgaaatgctgcctgaggactcaggtcagggaattctggatatagtgctgacctggctcagtcctgggtacctgcatttcagtggcaatgtcaggagatggcgttagatattagggtaactgcgggcccgatgccagtaaacctctatgtaggacatgacagaatcaaggggaggctccaccatggctgagacaagccagaggctgctccttggccatgggggaagtagatcccatggatgtgactcctgtagctcatcccactcaggaccacggggactgctgagggtgggtttcctgatccctcagggcctgactgtgttctcttctcctctcttacaccattggagcttctcactgactcaggtctagtggtgagtctgtggaatatctggatacagaaactgcccaatatttgcttcaagtgactcctccctgggaaactcttgaggaggcccccacctcaaggtcatctttttctccatggggagcagcagaaacattggccattcccatggaaatggctatgaggcctcccagagagaacccctaagtttatgacctaggacaatagtgatggtccctcaggggtcccagcctgcttctcctgatctgggtttatccacacagcctcctggagtgcctctgggctccagcctgaggacctggctggttatcagtgtcacacagctgcatcctgactccatgttaccaagggttcctgttccatgtggaaatgatagaaagatctccccactcatcctgtctccccatccctcctttatccctgcctgtgaccaacaccagttcatgccaagacttcagctgtcagttgtgttactgaaagcagagcaagggttcagggacgataactccttttcttactggtctccccagtggaaagagaatcagtttgtttcaagaagtaaaataagctgcccacacatggtgggtgaggatgaggtggaaatgacaagaaagaatccagcctggctgggcatggcagctcacacctgtaatcctagcagtttgggaggcggaggtgggtggatcacctgaggtcaggagtttgagaccagcgtgagcaacatggtgaaacatcgtctctactaaaaatacaaaaattagttgggcatggtggctggcgcctgtaatcccagctactcgagagactgaggcaggagaatcgcttgaaccagggaggtggaggttgcattgagctgagatcatgacactgcactccagcctgggcaacaggcagagactccatctcaaaaaaaaaaaaaaaaaaaaaaagaaagaaagaaagaaaagaaaaaaggaaaagaaagaatctaggcagtgtgacccagaagtccaggagccttcggcctggtcccacaggtgtcccctcctttttgaacaggtatgctggccatttgctgagctctgaaactgtgggagtgataacaagaaaggcgaatccagcctgtgtgacccacagatgtgagagaggtagtctgatgcttaagaaaaggtgggatcagccttctgaaaggtctggatctggcttggcctagagctggtgtagaagagaagcaagagagatgcttagccttgggtggcccaggcccagctgtcctgtcaaggggctgagctctctgcaacatggaaatcctgcagagccatccttgggaggctgtgatctcagtaggatgcaaaaatgctaatggaagtgagcaggggatggtttatgggggaatgaggggacggtgtggggtcaggtgtggtaaggagggtgcaccctgaagaggagagtgtccattgtgactcacaggaggaggaggcccggggcccagagcagtgacaaaaggaggacctggaaggacctgggccctcaagacacacagagactggggttttggtctgtccctgagggtccctcaggaggatcacataaaaaatccatagtcagtgtcctctgtccaaggctcactgtcccagctgttgtccctcccggatcctctgggtgtccacatcctgtagttttggacctgttcttctctctgccctcaacctaacagctgatggggcatccaccaggaagcgcatccgtgggcagggaggaggccgtgggcagccttgtcctgtatgtgagacactgctcagactcggtgaccccctgttcattaacgtgggaggaaaggaaaacaaaattcactgtgaacatctatacatcatcaaagaaaaagcaatgagaaaaaacaggaagtgaagcccagctctaatagtttatttctacttggaaataaataaaacttaatatgcctgatgtgttatgtaaatacaacaaacatattttaaaaactataaaaattatgtaaaggcacatggcttacactaaaagaaacatttaaaataacaacacccttgaaatgcaatcccaaaacacagcatacattttatttcagttccatgtatggactggttttatttaaatgtctgtattaggtttcactatttggttgtttaaatggagcatttaaaatcttattgtattacaacttatatcaacataatcatcttgctgtttttctgtatccccttaaaattccctaaacaaatatttattaagagcccagggtgtatcatgccagaactcaggcagtcacagacataacctgtttcatttttcattttgatcaacagaattatgttttctgttaagcttgttgtttttagttcattagattctagacgtcattacagatcaaagacgaaaaatttctatcatctttaagccacccccacaacactcactactgaatttgaaccaaaatcttctcctagaaatcctcgttggcggctcgatagtaagagctgccatgtatcaggctcacctgaggacagacgctggttaaaccaagttgaagttttaattcttcccatcttcaaagactgagcatctttgctctttttgctcataagtgaaacactccaaagtcatttgccaggatcccctgtagatgggcattcagtgtacagactcctaggcaagatccctggtcacagtatccaaatgactttgactgcaaacctggggaagtagagagagaacaaagatttaccagaaaaaccctctgggaatgtcttcccaaggcaccctagagggaagagctccctttctcttcagctccacaggatccacagaggaaggagagctctagccagcaggaaggagccacatgagaggagaggaccaggtgtcccacacaggtggggaagtgagtccatggggctggtccccgctctgggcttgatcctgacataagaggactctgtgtagacaccacctgagtcctctgcaatgtacagccacagagccatggacagattcactcctgaggagtccagtagagcgcgaagactgccttgaggtcacagcgggaagacacaggtgtcacttgagctggcctggacctgagagagggggcagtggacagaacagaggggaggcagtggtgtgaatgagaggctctggtcaccttatcatagaatggtttaccttggctggacaccaggggacgctgggggaccatttctgagaagacgcgcggggggcgggggtgggcggtgatgggagcacaaccggccacctgttgtgcctgttgtcctctgctcagggctcacaactgtgttctccccaccctctgggaccacagagctccacccctgccacaccctgacatcctcaaggcaaggagcctgacccagggctcagggtggggtcacaaagctgggggggtctgatttgcatggatggactctccccctctcagagtatgaagagagggagagatctgggggaagctcagcttcagctgtgggtagagaagacaggactcaggacaatctccagcatggccagcttccctctcctcctcaccctcctcactcactgtgcaggtgacaggatggggaccaagaaaggggccctgggaagcccatggggccctgctttctcctcttgtctccttttgtctcttgtcaatcaccatgtctgtgtctctctcacttccagggtcctgggcccagtctgtgctgactcagccaccctcagcgtctgggacccccgggcagagggtcaccatctcttgttctggaagcagctccaacatcggaagtaatactgtaaactggtaccagcagctcccaggaacggcccccaaactcctcatctatagtaataatcagcggccctcaggggtccctgaccgattctctggctccaagtctggcacctcagcctccctggccatcagtgggctccagtctgaggatgaggctgattattactgtgcagcatgggatgacagcctgaatggtcccacagtgctccaggccaatagggaactgagacaagaacccccttcctcctctgtcaggagggtgagccccagcagctgctgctcaggcctggcctgtggcttctgctgctgcagcttccttcatgggtccaggggcatccagggccctgcctgagagtggaggctcctcctccccttcagtcctcagagtcaggaacaggacatccaggaaacagaacatcctcctccctgcagcttaggacacagggtctctgcactgaagtcctgggctgaggtggcaggtccagttgtgtcatctcagacccacctctgatggggaacccgtgtctccgtcatcctccttttcccatttccaggagtttccagagtggtgtcttcctccccctgctcctcagtgtgaatccctgtgcttcctttctctccagcctattcttttttaataaaactcctttcatgtaggaactatgcacatctaataaactacccatatttataacaggaaattagacaaattttggcatttttctggttccttgaaaacatcaccatccccgggagctattgtgaccatcccggcagctcctcatgatgcttgtctcctccctccctcccctaatggcctctcaggaagccacagatctgcctctctcactactgtttggtttttttttctggaatgtatcagtgttatcaaacgttatcttcccatttgttcaggcttctttcactctgcacacttgctttgagattatccctgctgtcgctgaattgcacccatcccttagagggctcattactatctttaagggtccttaggccatttttttctgattttattcatgtatttcctttaaagtttgaatttattgttcatcaaacaaactctatgggtgatgttcatctaaggtgacaggacagtccgtgatggtttgtcaggattcttgcttcttcagttcttttcttggctctctctatagtggaagaggttctcatcttttatttatttatttatttattttggggtttttttaagggttttagcgattttccctttttaattatttttaaaatttgttattttattttaataggtttttggagaacaagtgttgcttggttacatatataagttcgttagtggtgattcctgagattgtggtgcactcatcatccaagcagtgtacactgtatccaatgagtagcctctcatccctcacctccctcctatgctttcccccgagtccccaaagtccattgtatcattgttatgcccttgggttctcatagcttatctcccacttatgagtgagaacatacagtgttttgttttccattcctgagttacaccagttagaatgatagtctccagttccatccaggttgctgtgaatgccattattttgtttatttttatggctgtgtagtattccctggtatgtgtatgtatacatcacatttgctttacctacttgttgatttatggacatttgagctggttccatgtttttgcaattacagattgtgctgctataaacatgcgtgtgcaagtatctttttttgtataatgacttctttttctctgggtagatacctagtcgtgagattgctggatcaaagggtacgtctatttttgtttccttaaggaatctccacactgttttccacagtgattgtactagtttaccttcccaccgccagtgtgaaagtgttttgttttcaccacatccatgccaacatctgttatttttttattatagctattcttgtgataggaaggtggtaacacagattgtggtaccgatttgcatttccctgattattagtgatgttgaacatttttctatatgtttgttggccatttgtacaagttcttttgaaaattgtttattcgtgtccttagtccaccttttgatggaagtgtttatttttttcttgataatttgagttcttcgtacattctagatattagtcatttgttggatgtatagattgtgaagattttcatccactttgttggttgtctgttaactctgctgattctttcttttgctgtgcagaagtttttttcgtttaattaagtcccatctatttatctttgttcttgttgcatttgcttttgtgttcttggtcatgaaatatttgcctaaaccaatgtctagcaaggttgttctgacgttatcttctagaattcttaccgtttcaggccttagatttaattatttgattcatcttgagttgatttttgtataaggtgagagatgaggatgcagtttcattcctctacatttggcttgccaattatcccagcaccatttgttgaatatggtgtcatttttctactttatgtttttgtttgctttgtcaagcatcagtgggttggaagtatttggtttcatttctggattctttattctgttcctttggtctgtgtgcccatttttatatcagtaccaagcagatttagtgactatggagtcaaactttactggagtttgaagctgggtaatgcgatgcctccagatttgttccttttgcttagtcttgctttgtctatgcaggctctttttggttccatatgaattttaggattattttttccaattctctaatgaatgatggtgatattttgatgggaattgcatagattttgtaacttgcttttggcagtatgatcattttcaatgtattgtttctacccattcatgagcatgggatgtgtttctatttgtttgtgtgtgtcatctatgatttctttcagcagtgttttgtagttttccttgtggaggtctttcacctccttggctaggtatatcctaagtatgtattttgcagctatttgcgaaaggggttgagttcttgatttgattttcagctcgtttgctgtcattgtataacagagctactgattcgtgtgccttaattttgtatcttgaaactttgctgaacttatttacagttctaggagctttttcgatgagtctttaaggttttctaggtatatgatcatattatcagcaaatagtgacagtttgaattcctctttgtcaatttggatatctttgatttgtttctcttgtctgattgctctggctaagccttccagtactatgttgaatagaagtggtgaaagtgggcattcttgccttgttccagatctcaggagaaacgttttccacttttttccgtttaatataatgttgactgtgtgtttgtaatagagggcttaatagaggacataagttatgtcttttctatgtcaattttgcaaagagttttaatcatgaagtgatgctggattttgtcaagtattttttctgcatgtattgagataatcatgtcatttttgtttttaatgctttttatgtggtatatcacatttattgactcacatatgttaaaccatctctgcattccctggtttgaaaaccacttgatcattgtggactatgtttttgatagctgttggatacatagaataatttaggaaggagtccccctttttccttcctgtggattaatgcattagtcagcgttctctagagggacacaaataatggaatatatatatatgtttattaagtattaactcacatgaacacaaggtccaacaataggctgtctgcaggctgaggagcaaggagagccagtccgagttccaaaactgaagaagttggagttccatatttgaaggcaggaagcatccagcatgggagaaagatgtaggctgggaggctatgcccatctctcttttcatatttttctacctgcttattttctagccatgctgtcagctgattagattgttcccacccagattaagggtgagtgtggctttcccacccactgacaaaaatgtgaatctcctttggcagcaccctcaacagacacacacaccaaggatcaatacttttttttttttttttttggagatggagtcttgctctgtcacccaagctggagtgcagtggcgcgatctctgctcactgcaagctccgcctccagggttcaagcaattctttgcctcagcctcccgagtagctgggactacaggtgcccaccaccatggccggctaatttttttgaatttttagtagagacggggtttcaccgtgttagccaggatggtctcgatctcctgacctcgtgatccgcctgcctcggcctcccaaagtgctgggattacaggcgtgagccactgcgcccggccaatactttttgtccttcaatccaatcaagttgacgctcagtattactcatcacaagtccactccttgtcagcatgaacccatatacaacttgtgatatcgtacataatcttcaaataaagacaataataaagtcataattacgcctaacataatacaattatccttcatacaaccagaacgcacgaatccctaacacaaatactattacatcaagttactgatacttaaatgctgatgtgacgtcaataaatcttatgttatatgacaaaggagaaaggaaataaaatgaagatattttcttagtacgagtttatagatgcgcaaacatgtttttaacaaaagaaggaggaaatactcttgacaattacactcctcgtttctgccgctggccatagctggtattgatgactaccttcttctactacccattctgtattccctttgccttcagcaagcacctcagtaggttgtgttttttttcctggtggagtgacccaaatcttcattcctgaagggtcccattgaccttaatcacagggcatggtaatagcaagaaatgccctaatgcatctcctgtattccatgcatgttcttcagtaactccattgtggagtagtaaactgatttcattttgatagtctgggtcaatcaccccagccgacactgtaactcccttcttagccattgacttaaaggtaggagaagcccaaaatgtccaggtggcaatcttaacttccagtttaatggaatcattgttgtgtctccaggtggtagtgttccttcctctggaagtaaatcctttgagccagcagaacataatgtctcaggaacaggaagcaaaacatttgctagtggatcactagggttgatggtgagtggtgccacttccacttccaccccttgattcctggatccatgaatcctggctacaggagggacagtaccatatattggatgctgatttaaagcatacacagccatctggagaactttgccctggccctgcaaagtattgtcacctagttggcaatgtaattgtgacttcaaaagccattccactgttctatcaatccagctgtttcaggatgatggggaacatggtaagaccagtgaattttgtgagcttgagcccactgctgcacttctttagtcataaagtgagagcctttgtcagagcattgttgtgtggaatatgatgacagtgaatgaggcattccaagagtacacggatggtagtctcataggcaaaccaatatctaggataagtgtctatttcagttaagacaaacctctgcccttcctgtgatggaagaggtctgttgtatttctcctcacacagggcaccagttgagatattgctcctcagaagacagcattagctgcgggggtctgcctgcagaccctgactcaaacgacggatgaataaaaacggacactgacacacagatattctgtttggccagtccggctgggttctttgattctgagtgtccgacaacatacacaccaggagaggtttgtcactgtggtgggtcctgagcagctggtactccaggcatttatttagtatacaattaacaacagaagctttgagtaaacacacttgtggataattaacatggttaagagagtagttctacgaatgattaaagctcaggtaccctggtctaaagtaaataccattacggggcaatatccctggttgacctcccaccgagagggccatctggctcaaaggttagttaatggagatagggtaaacaggcttaactgggaaagcctccattgtccctagcatttaccctatgacctaatgctctaaggtaagaaccagctgccttcagcctgtacaattattacaagctatgtaacattttagccttccaaaatgtttgtgattattccctataactttccctaatatttccctttgatatttctgccaccatcctgagtgaatcccaacagaggtccaatataatcaacctgccaccaggtagctggctgataaccccaaggaatggtgccacatcaagggctcagtgttggtctctgctgctggcaaattgggcactcagcagtggctgtagctaggtcagccttggtgagtggaagtccatgttgatgagcccgtgtgtaacctccattcctgccagcatggccacttccctcatgggcccattgggcgatgacaggggtgtctggggaaagaggatgcgtggtgttcacagaactggtcatactctcctcttgattattaaaatcctcctctgctgaggtcacccgttggtgagcgctcacatgggatacaaatactttcacagtttttgaccactcagagaggtccatccacatatcttttccccaaatttctttgtcatcaattttccaatcatacttcttcctagtccctgtgacagttactacaggacagaatgaagggggactaacacagaaatgaagacaaagacaaagggatctgttttaaagaaggggtcagggggctccttgcttctagtgagcaagggccctgagctactgcaatccttcatatttattaggtagaaagaacagggaggaggaggtaacagttggtcagctgcttgatttatcacaggttcacaggattgctttctttatacaacatacttcagatgtgctgcagataatcaaaagaaacactgtgcttggggcgtgacggctctcagcattcgttctggtggtagatgcagtttgtcgtttgccaacaacctgcattcatgagaacagcttgctgtttgctccagtggtatactgagttggtcacgaccctcattctttcggcctccaagaagtccctgatcgtccagccaaaccgttgactacagcaaataaattcatatataatcacacatctggagatttctccttccatgcaaagagcacaaccaggtgtgctcctcaaagttctgcccaatgggaagatttcccttcaccgctgtacttcagggatgtcctggaaaggggctgtagtgctgcagctgtccactttccggtggtgcctgcatatcatgcagatacatttgtgaaccaggccctagtcttctttctgtcagctgatcatagtgaactgcccctgagaccaccagtgcaggctgggggatagtgcaggctggtggcaggagtggaggtcatggacatttgagccacttccccatgtaacttacttgtgccttcagcccaaatacgtatataccacttccactgaatgatggaatgctgctgtgcatgatccactttatggctaaatgggttagaaagcacccacttcatgacaggcagttcaggttgcgtggggactttaagacgcatagtcaaatgttcagtttccaccaaagcccagtaataggccaagagctgtctctcaaaaagagagtagctacctgcagaagatggcagggccttgcaccaaaatcctagaggcctccactgtgattcacttacagtggcctgacaaagactccaagtagctttgctatctgccgctgacacccaaataccattgggtctgttgggtcatacggcccaagtggcagagcagcttgcacagcagcctggacctgttgcagagccttctcctgttctgaatcccactcaaacctggcagccttttgggttacttgataaatggactggagtaacacacccaaattagagatatgttgcctccaaaatccaaataggcccactagccattgtgcctttcttggttgtaggaggggctaaatgcagcaacttatccttcaccttagaaggaatgcctcgacaggccccacaccactggacacctagaaattttattgaggtagaatgcccttgaattttagttggatttaccgcccatcctcttgcatgcaaatgtctcaccagtaagtccactgtgtttgctacttcttgcccactggatgcaaccagcacaatgtcatcaatttaatgggtcagtgttatatcttgcaaaagagacaagcaatcaaaatttctttgaataagattatgacacacagctggagagctcatatacccctgaggtaggaccgtaaaagtatattgctggccttgcctgctgaacgcaaattgcttctggtgggccttatggaccggaatggagaaaaaggcattttccaagtcaatggctgcatatgaggtgccaggagatgcattaatttgctcaaacaaggaaaccacatctggtacagcagctgcgattggagtcaccacttggttaaacttccgataatccactgtaattctccaagatccatctatcttctgcacaggccaaatgggagagttgaaaggggatgttgtgagaatcaccacccctgcatttttcaagtccttgatggtatcactaatctctgcaatccctccacagatgcaatattgtgggtttatttttttttaataaagtttcactctgttgcccaggctaaactacgatggcagaatcatggctcactgaaacctccatctctggtttcaagcaattctcctgcctcagcctcccaagtagctgggattacaggtatgtaccatcacaccccacgaattttttgtatttagtgtagatgaggtttcaccatgttggtcaggctggtctcgaactcctgacctcaggtgaggtgatccacactaagatccagcttatgtggatcttttctcttcttttcttggttaatctcactagtggtatatataattttatttatcttgtctaagaattggtttttgtttcatttatcttttctatcatttttttgtttcaattttatttagttctggtctgatattgctatttcctctcttctgctgggtttgggtttgcattgttcttgattctccatttccatgaggtgtaaccttagattgtctgtttgtgctctttcagactttgtgatgtacgtatttaattctaaacattcctcatagcactgcttttgctgtatcccagaggttttgataggttttatcaagatttagtacaactgcaaccttactattggccaacggcttttgaattcctaagagtgtgacctcatttaatcctgacaacagctttatgattgcttttcattcagtaggtcgtgattagagagggagtgcttgtggcctggatggaaggttctccagtttatcaaataaaaacaccgaaggtcagttaaatttgaattcagtaaaacaatgacaaagaattagtatgtgtaactcccacacaatattgttcatttgagatacaaacttaccttgtagttcatctgccaactgcacacagggttcaaagcctggaagaggcagagttagagctggtcttctcttcctgatgccaggtctatgagctgaacctcaaagacagggcttctctaacacagctaccctcaagtaagcacatcggttagcactaaatacacagtatacgatgcccaatcaataatgcctactcacttttctaattcttctttctattattcttcaaatctgcagactcaagacctcccgaaacattgcggcagccaggattttgaatgagggtcctcatatgtctttccaaacaagatgcaagggtgctccttggtccctacacagaggggcttaagccaggagtgcataagtaacatgtaagagacagaagaactcaacctggctctccctctgtgcagtgaaacacctaattccagggttctttgattctgaaggtgggtgggctgagagaaagaggagccccaccctgagagctccgagtattcaggacaagacttggcagcctgaataggggctatactcttgagtgtggaagaagcaggcatctctgggcacaggctgcttttctggtggcttctccttcaccaaactgggctccctgctgtgatgtctatcagagaatctccttcagtaagaccaagattccaggatttaactaaaaatagcagcacagaccagaaaggtatgtcatggtacttgaattctgtgcagagcaataagtacaaatgcagcttaacaggggccttcagagttgtatctttggtgaaggagaaaatagacaatggcagggagaaactgaaggactcagtaggtctggaactggggcagcactgggtgctataagcttgtccttcaggggtctacagatgctgacacctgggaagtcatcctgcatcatctgctcactgctcactgggctcagcagctatgtcctcacaaataaccagattcaatcaacctggccttctccacccaacctggggaatgtattccagtgactgtttcaactgaggttctatgaaggggttgggggataagaagaggggactgatttgcttgaagaaaccattgcacaccctttcctttcatctaaaacctattaatggaaactctgaggccacccatagaagtctagctggtcttctaaatttgggagttacgaaggagtcattcctgatcaatctacaggataaggggccatcagcagctggtggtcagagtgaggaagaaaatggcttccttgagagactcatcagcacagccaccaactctggggaaaatggggcacttgctataacagtcaccccaaactactcacaggagcctgagcctcgtcccctcaccttattgtttctgattctggtccatgcctctgttttccctggacccctcgcccatgtctgagtccagggtagcaggggtagttccatcccagtcaacatctatacagaagtaacagctgctatggcttgaagccgagtctacagttctacccatgagggcctctttttctccccaatcccctcacacaggtgaccagtgctgtgggtctggtggagtggccactggccactggtcccaggcgaacacaaagtatttattcctctctaacaccaggcatatattggagggggtttggtgggtgtagaacagagtggttcttccagatgcaaagcagtaagaccctgtctacagaaagtcatttcacaaacctccacaccctttcatgataaaaacgctcagtgaactatgaatacaaagaaactaccctaacatagtaaaagctatctatgaaaatcccacagtcaacatcacacataatcttaaagaccaaagatatgtttttgtaatatcaggaacatagcaacaatgtacacttcactgcttctattcaaaacagtattgaaagtcctagccacagcaataaggcaagagaaataaataaacaggataacaattagaaataaaaagtaaaactatctctgttttcaatggatttaatgtcatatgtagaatacccttaaaagttccacaaaacagcttttgtcagaatgattaaatgtattctgtaatgttcagaatacaaaatcaccatgtaaaaacacctcatggctgggcatggtgactcacgcctataatcctggcactttgagaggctgaggtgggaggattacttgggatcaagagttcaaggacagcctgggctacaaagcaagagcctgtctcaagaagaaaaacgaaagaaagagagaaacaaagaaagagatagaaagaaagaaagaagaaagaaaatctcttatatttcaatacttagaaaatctcttatatttcaatatttaaacaaggacacaggaaaaaacccaaaacaaaattaataaaacaaatcaaattgcaacatcattagagagagtaaaatatggctgggcacagtagctcatgcctgcaatctcagcactttgggaggctgatttggacggatcatctgaggttagaagttcaagaccagcctcaacaatatggtaaagcctcgttcctacaagataaaataaaataaaattgctagctgtggtggcacatgcctgtaatcccagctactcaggggtccaagtcacaagaattgcttcagcctaggagggagaggttgcagtgagccaagatcttgccactgtactccagcctgggtgacagtgagacattgtctcaaagaaacaaataaataaaaatgaaacagtaaaatacttaagaataaagttattcaaagaggtgaaagacttgtagattgaaaagtataaaacattactaaaagaaattaaagaatacacaaataaatggaaagaaatcctttgttcatatactggaaaactcagtattgttatgctaacaaaacaaaccaggaggaattgacagattcatttcaatctctgaaaacattccagtaatattttatgcaagaatagaaaaaaattaaacctaaaatatatatagagtatgaagggaacctaaacagtcaaagtcatcttgtaaaagaagaccagtgttggaggtctcacactttctgatttcaaaacatactacaaagctacactaatcaaaacagagtggtatatatgtaacatacatactgacaaataaaatagaactgagtgcctagaaaaaaaactcttagttatacagtcaaataattttaaacaaggttgtcaagacttttcagtggaaacagtacagtctttcacaaatatagacgttctgggaaataatactgaatggcttttgctgttgttgtttttgaatggtctcaaatgttctctcaaagatgctgcagaacatagcttattgattttgtaagttaaaaggctgagtaagactgtgagagactccctgctcatcatcattcttcttccacttccagtgactactcttatattctgtgccataagccaacagctactgaccccaggatcttttaatccttctgtaaaactgtcattaaaaaaaaattgtctaaagtaaattttttaaaaaattctcacttaaaccagctgtttatccaatataaggctcaacacaaatagttacagaaagccagtaggtcattaaaacaattaatttagtcattcaaataaaaatgaacaccatgtaacactaatatcaaattatagtcacaggggcaggatttcagcaacagcaagagaaagtagcacaaataggaatgagcaaagaatagacaattaatgagtgtgaattggcctggaaaatattgtggcaatgtccaaagataaatccacagttatttgtgaaacaagtgaaagaccacgcattctcagtccaggaaagccaccagggggtggtctgggtctcttgaactgtaagaagctcaagaggtccaaacttcatgaaccctgcacaggtgctcattgactcatgtaaacgttagagcagctgcttcctcccacaggacaaatccacagcacacagcctccctgggctggcccctcacagtgtagctgctctcaggcctgtggacccaggtggtgataaaggcagtaaagatttgcataaagcagcacacagcacaccccctccatggagagagctcaataggagataaagagccatcagaatccagccccagctctggcgccaggggtcccttccaatatcagcaccatggcctggactcctctctttctgttcctcctcacttgctgcccaggttaagagagatttcaaataccagcctttggagggatccttctgtctgcccttctaatttctaacatgtgtctgttttttgtttcagggtccaattctcagactgtggtgactcaggagccctcactgactgtgtccccaggagggacagtcactctcacctgtgcttccagcactggagcagtcaccagtggttactatccaaactggttccagcagaaacctggacaagcacccagggcactgatttatagtacaagcaacaaacactcctggacccctgcccggttctcaggctccctccttgggggcaaagctgccctgacactgtcaggtgtgcagcctgaggacgaggctgagtattactgcctgctctactatggtggtgctcagcacagtgacagactcataagaggaaccaagacataaacctccctcggcccttgtgatgtggagattgtgtgatcatacacaccagctctcaagacagcctacatgtggaccagccatagaaaggggaaggaaagggtctgaattgatttctatccctccttgtgccctgaagtggaggaaatgtgagagtgatttgcagtaattgaatgagacaaagcaaaagttatttgttttatatgaaaaaaaaaaacagaaacagcaggatcagatctaaaggctgagtctaaatgcatttcctccagacagaagcttcttcaaacgatgggctttctgagctaagagcaaagaaaataaactctccacgggtatattattaaagtttattttattgagttactttcaaagcaatccatgactattatataaagtcagaaagtattaaaaatcaccaagttctctgctaagctaccttatcccatgcaatcaaaataagtacttttcttcatttggatgcattttttatttctgtttttaatatttccacaatggtgattaaacctggtgctcattcctctggtttgatccacctttatgctcttgtcatttaaagttaatgtaagtagtgttccatttatttaaaaggataaaatattttaatagttgatcattgcattttgaactgagtaccagtgaagtattctagcttttaggtaatttcaattgtttgctagtcaatgatgttatacgttgttgtcattaaaccattcctggtcatttctgtggattttgtgaggtcagagaaaatgtctgtgcttttcaatggaaagccttgggtacattattcctgacttcccaacgcacaaaatagagaaacacaaatttcctgctcatgttagttagagcataagagattcaggtacgaggaacaatttataccccaaactacatacagtgtcttcaggcatgtattagaagtgtacttctcaaactctctgatacccttagttctgaagaagctcaaagttggctaatacttttatatttatctttttattttttttacctcagccagcactttctcctgattcctggggttttctgcatttccagtgaatccagtgaatcacacaaataggctaactgattcttcccaaactccagcactctcccttatgtgctgatctagtgaggaatcacatgggaagagagacccatggatttctggcggcctgggaagtgagttcatggctggcctcagcttgcaaaccagacacttgtctccttgtttccctttactgttcattgggttcagcagctgtgtccttccaggtttcctggacagtgatggaccacactctcccaactcccaaccacccgctcctcaaaaggaataaccagactcagcaacttatgtgaggggcacagccaggggtcaggatagattggcattaagtcccctcaattaagagaggccagggaaggggggctgttccccctaatccgtgtggctcaggaagcagagctctagagacatctctaccatggcctgcaccccctcctcctcaccctcctcagtcgcggcacaggtggctggagacagggagtcagggactggcactggcaggaccagggctctgctttgctcccctggctcactgagctgcctccctcaccctgtgtctctctcccgactctcagggtcccgggcaatcatggctcatcaggtaacctgcaccgtctgtctgtggctaaaccagccaccatctcctgaactggaagcagcagcaataaggttcttggaattgtgacctggtgccaacaatgaccaggaagtgcctccaagcttctgactcatagaagtaaatatctgcccgcagggattcaggacagacgctcaggctaccagtcttgcatgaagcccttcctaagcatctctgggctttaggctgaggacaaggctgatcactcctgttggcttcagacagccccctggaggtccaaacagtgctgcagtctgggaaagtgagatgagaacacgccaggtctcctaggagcatgaccttccaatggcaccacccacaaccaggacagctggtctgtttaccatttgtgtggatgtttcttgatgctgccgctaaccagggcccaagacttagttcggggacagtgatctagagaatacagctttgttctctcacagccagccctcagaggaagcccttagcaacagcattgtcagactgcctcaaaaaaatcagtctttgattccaggaacaggctgccctggggacagactcaagatgagtcagggtaagcagggacagaatccagctgggtctgcctcaggcatgtgcactaacgcaaaggtctgttcatccttattgtctactaaacacctattatgtgccagtctcaggagagtgctcaggatacagagtttacaagacagacagggttcctgtctttacagggataatgcctcacagaagagtgagcaccaacaaatcaatgagaataaggcatattgtgaggtataaaatggttgacatgggccagaagacagtgagcaacaagaagctattaggaggttgtaagcaaggagatacagactctggtttgagattcaggaggcaaagtccagcttctctaaggaagatgaaaaaggaggggacagagtgaagaaagatggtccagttaggacatggtggctttgtacacatgagagatgaggtttctggcaagtaatgtggcagctgagctgaggcctgtgctgtggatcccagacgggagccacctgctaggcctaggctggagccctctgcctctgctcacgaggaccagcagctgtgtccttacaggtccttagggagccacagaacagccccaccctggtccaccccatcccaggctcagctttctaggcaagggtcagagtcagggcctagggtgggacttggccagcccaggggaggaggctggtgtgcatgaagagaccctccttcatcctgggctgctggcgaaagtaatagggactgggggagctcaagcccagctgagtgtcatcaggatgcagagctgtgtgtgggtccccaccaaggcctgagctcctccctttctcccccttctcattcactgcacaggtaactagggctagggatcagggctgtgggtgaatggaacgaggaccctgcatgctgccctctcaactgacccacctctctcaccctctgttagtccaggtgtcaaggttctgggcccagtctgtgctgactcagtggtgtgaagagttcctgtgggtggggtaaactgccgccatctatcacacttgaagcagaagcaaggctgggtgtgggcctgtgtcctggtatcagcagtgcccccaaactcctcatctatgacagcagtcattggtctgcacaggtcccagcgaagttctcaggtcccaggttggggatcatggcatccctgagcatctctgggctccaggcagagaatgaggctgattctttcgctcatcttgagacccaaggatccatgattaggcagtgctgcaggccagtgggtagctgggaggaaaaccttctgtctccccagtaatgtgtcttccctcttcagcctccaccccttcagcacaagtttctggggaggagggtctgaagcccgggtgagaaaaagggtcaaggctggccttaggacctggatgggcacagtgaccccctgctgagagggccttcatgagcaagaaggctgggggaggtcctgagttgatttttacaatggaaacagacaccagctccccatccttgttcaaaagcatctcaggaccttttcctctgcagatggcaagggggagaatctccctctgagatacatgagaattcccttcccatgacctgtcctgtcacctggatgaattcgtatttggaaaccaaatgactccccagtgccaggcattacatcctcacagaaaacctgccagaatgagcaagatcttccctccctgacccactggccaggaatctcggacatcaggatggctggactagatcactcatgccatctcccctgacatcatcatggttaccggggggactctctgattaatttgggccacacagtgcctgtccctggcattgcagttggggacgcttacaggctaagtttatggctgggagacctagggtctagaaaggagaggaatagaacagaagctttgcctacatggccccctgtgtgcatcactcttccctccacctttatcctaagttcatgatgggtgatgtctccttgaggctggaacctgggcagtgacatgggcctgtgtgtcctcatctcacaatgcttcatcttgggctccctgacctttctgatattcctataatggatcaatttcaggctaggacacagccatgcccatacaggaggcagtgatctgagaatcaggtagtcttagaagagacagaaagcaaataaacaccctcatgttggcctcctaagcccagaggacataaggaaatgaaaggaattcaagaagaaacataagtggtcactgcccaccatcacctgggcacctgttctccacctgcccctctctcagtgaggaccagactcagaggcctagagaaacacgtcttcatctgttcacaccgtggggtgcctccttctggactcatcccaagactgctgctcccccagcttacctgtgtaactgctgagagtcttcacagggacctggtcacagggtttgggatcaggatcagcctggctttaactcagctgtgaccctgccccttcaggacaaaaagtgaactattagggctctaactgaactctcctgatttacttaaatcttatattctccttctcaatatccttctaggaagttctgtctctacccaataatgtcaggtcatttcctcaggcctagagccatttgatttccagacttctatactcacacttatgctctcattctctgtcatggttcatttactacgcagcagctaatgaggccaaccatgtatctacagcccattgacatgaaaaatggggaggagagggttccttagataaatacagggttagcaaaggaaagtttcttaggaatcacttcaggatccaagaaaattcattccagagcttcgagagtttacaactcaaaaacaacagcataatatatgaggtggtgaatcttcttggccttctcaatgaataacctcagaaatggtcagagaatatgcttcaaaaaggtaagagtatgactttcacaaacatatagtattcacatatgtcaacaattttaattggtttatgtattttggagaaaaacagtatgatgataaataaatgttaaaaagcatttttaaaaactcagtgcttatactccaccaggatagaacctgtgaaggaaatttctgtgttgaagatacactgtcttttagaataatagcaacatagctatgaattttgtcttctcatctcacaatctacaaattaaaatcaccccatttatgtgaaatatctagaaaaatacaggtacatttggacattcccatctgccaccacccatccatcttctcctaaagtggaatccctctgcccccattctgctcctctccacacatctacctgctaacacgtgactcctccctgccttcctttccagatccctagcagattgggcccaccaggggaacaagctcttggacctggggatcaaaagtgcatcttgttggacttctgaggacttgccctgcaagggtctctttctggatcacaatccctctgttcctgggcatccccttttgctggatcctgttatttatctctgtgttactccatctaggtctactctgtggacttccctgcatcttcacctgaaccccaggaatcttcaagtcatgccaatattccctcagttctcctgaaatgtcttattttctcttctcctgagatcccaccaagtcatcccttctgagacccctgagtgtagcagggccctctctggtctctttgcttcaattatgaatgaggagaatgggaggtcctctttgccgctcctacccctgtgttgccatcaggatcagcttcatgaggcagaatgaggctgtctagatcaacatggctttcccaacattgagctctgtgcccagcacaaggtaggtgctcagtaactatttgagaaaacctacatttcatcacactggccacattacactgagtccaggatggggatgaactgggagaagcagtggtggaaatattcctctctctgctttcaggctaagaactgatgggacgttcaccagggagagcatcccttggcagaaagggggccatgggcatccttgtcctgtatgggagacactgctcagcctgggggaacctctgttcatgaaggtgggagaaaaagataaacaaaattcactgtgaatgtctatgtatcatcacagaggaggcaatgacaagaaaataggaagtgcaagcccagttacaattggtttctactttaaaagaaataaaatttaatatgcctggtgtgttatgtaaacacaacaaacatttttcgaaaactataaaaatatttaaagtaacatggtttacaataaataggaacatttgaaataatgacaccctggaaatgcaatcctaaaatacagcatacattttatttcagttatttatcttgactggttttatttaaatgtctatattagagatcactacttcattgtggatttttgtttgtttgcttgtttgttgtttttgagatagagtctagctctgtcacccaggctggagtgcagtagcacaatctcgacttattgcagtctccagctcccaggttcaagcacttctcctgcctcagcctcccacgcacctgggaccacaggtgcgcaccagtatgcctggctaatttttgtgtttttagtagagatggggtttcttttttttttttttttttttttgagaccgagtcttcctctgttgccaggctgaagttcagtggcgcaatctcggtacactgcaacctctgcctcccaggtttaagcaattgtcctgcctcagccttctgagtagctgggactacaggcacccgccaccatgcccagctaattttcacatttttaatagagatgggatttcaccatgttgcccaggatggtcttgatctcttgacctcgtgatccgcccaccttggcctcccaaagtgctgggattacaggcgtgagccactgcacccggcctaagatggggtttcatcatgttgaccaggatggtctcaaactcctgacctcaagtgatccactcacctcagcctcccaaagtgctgggatgacaggcgtgagccacagtgctcgacctagtacattgtttaaatggtgcatgtaaaacctcatggtactacaactgcctggtgacagactcaccagagtaaataactatcctgctgttctccaaccacatgggattgccccaaaaaatatttgttgaatcccaggtgtatcatgccagaactcttgcagtcatatatacaatctgtttcattttaataaataggattatcttttttcttcagtttactgtttttaatgtatcatattctagatttcattacacatcaaagatgaataatttctatcatctttcagacatgcccaaaacactcattagcgattttgaacagtattctttcctaaacatcctagttggaatggttgatcctaaaagctaccacgtgtcaggctcacttaagtacagactctggtcaaaacaagctgaagttttaactcttccatcttcaaatactgagcatatttgcttgttttgctctttagcaaaacactgcaaagtcatttgccaggatcccccgcagattggcattcagtgatggagaacagactcctaggtgagatccctggtcacaggatcccgatgactatgactgcaagtctggaaaagaagagacagaacaaagatttaccagcataaccctctgagaatgtgccccaggcatcccggagggaagagctccctatcgacccaggactgcagaatccacagaggaaggagagctctggccaccagggagcagccacacgagaggagaggacccagtgcccccacaggtgaggaaatgagtccatggggctggtcactgctctcgatttcattctgacataagaggactttgtgtagtcaccacctgagtcctatacagtgaacagccaaggagacatggacagattcacccctgaggaacccagtagaatgtgaagtctgccctgagctcacgaaaaaaatgactcagggggctgcctggcctggccctgatggagggggccatggacagaacaacggggagtgaggggtgtctctgagaggctctggtcaccttgttatacaatggtggtgtacatgaccaaaatggacaccaggggatgcctgcgtaccattactgagaagactgggtgtgatgagagcaggaccagcgccacctgtcctgcttggtgccctatgcttagggcttacagatgtcaactctgcaccccctgggaccacatagccccacccctggcactctctgacatcctcaggcagaggagcctgacccagggcccaaggtgggatcagaaagctggagggtctgatttgcatggatggaccctccttctctcagagtataaagaggggcagggagagacttggggaagctctgcttcagctgtgagcacagaaggcaggactcgggacaatcttcatcatgacctgctcccctctcctcctcacccttctcattcactgcacaggtgcccagacacagggtcaggggaggggtccaggaagcccatgaggccctgctttctccttctctctctagaccaagaatcaccgtgtctgtgtctctcctgcttccacggtcctgggcccagtctgtgttgacgcagccgccttcagtgtctgcggccccaggacagaaggtcaccatctcctgctctggaagcagctccgacatggggaattatgcggtatcctggtaccagcagctcccaggaacagcccccaaactcctcatctatgaaaataataagcgaccctcagggattcctgaccgattctctggctccaagtctggcacctcagccaccctgggcatcactggcctctggcctgaggactaggccgattattactgcttagcatgggataccagcctgagagcttgcacagtgctccaggccaatggggaactgagacaagaaccctcttcctcctccgccaggagggtgagtgcctgcagctgctgctcacacctgacctgtagcttctgctgctgtagcttcccccatgggcctcggggcatccagggccttgcctaggagtggaggctccaccacttttgtcctcagagtcaggaacagggaccccaggagacagaatatcctgctcctcagcttgggacacagggtctctgcactgaaatcgtgggctgaggtggcaggtccaactgtgtcttcacagtccttcctgtgcctgcccatggtgtggggacggagtgaggaagtgtgggccattgagcttcactagaggcctgagggagcagaggtgctcccgaagacctggactccttccgtcaccctcctcccatcactctcctcactgtagctgtggccaggtgagggctcagggctacttgaggaccttgctcaacccagggcctccatcccaggcattgtttccaaactctgtaagggctgtctctgaatctgtagaaacatttatttctatgtgcccaggactgggttagagggcaccaaccccaccccttgcaaactgctcatcacctctcagtgaaacaatgaggagaagaaagagttagaaatcagaagcctccccaaggctcccctctctcctctcaaccagcctccccttggcttcctccttccacagaaataaagaggaggcagccacagaaggcaagggaaggtccaggcattataccaggcagtggagccagccagtccccccagatggtggagggaggtggtggaggtgtctgggaccagaaaatagtgaggaccctcttactaaagtgaggaggggtggcataaactgaggctcagatggtggaccagatctcctgagccatctactcatttcttcttgagtttcagtttcagtaagaataggataaaaaaaaagtctgaagaggttcctttcctcagataagaattcgtagaggattattgcccactcaggcattgaggggaggctgagcctccctctcaggccaatagaactgggggctttcatgggaatttgattgtactgaagctcccagactctgacatctaagacttatgctctcgtagcagagcccagcactgataccaaaatggataaaggctgattgataagcctggaatatcctagctgacaccgacttgtggaaaagagaatcaagttagaatattgatgtgataaggtggcatcgcacagtgaggagaggagagcttgtgtgggggagggtagaggagccattagagggttggacaaagaggacacagaatctgaggtaagtttgtgaggaaaactccagatgcttcagagaagatggacaaggaggtaggcagtatgaaggccatgggaccagctctagtcaccgggagtgagtggtgagattcagcaccagtgtctggggaggaggtactgaagcctgggtgaggggagatgctcaaggctggccttaggacctgagtggggcacagtgatcacactgctggggggtccttcaagtgcaagggggctgcaggaaggctcgagctcattgtcacaatgaaaacttagacaacagctccccagacttgttcaaaggtgtcacaggactttttcctctccacatggcaacggggagaggaaaacttatctctgagatatataagatgtttgttctccataacctctcctgtcccctggctgaattcctatttggaaacaaaatgactctccagttttacatatgacatcctcactaaaaaaaaagttccagaatgagaaagatctgccctccctgacccactggtgaggaatctcagccttcaggacaaccagacgaaatcgttcatgccatctcccatgacagcatcatggggaccagggagcatatcttatgggtttgggccacacactgcctgtcccaaacattgcagctggggacacttatatgctgaactcatggctgggagatctggggtctagacatgacaggaagaggaaaaagaccaggagctctgcctaagtagccccagtgtgtgaatcactctaccctccaccctcaacttcagttcgtgatgggtgttgtcttgcgaaaactgacagctgggctgggacacaggcaagagagactctgacccacaaatctccatcgtgggctctctggcctttctgatattctttttgcacatcaattctgggccaagacacatccatgctcatcaagaaggcattgataggagaatcaggtagcctccagagagacaggaagcagataaacaccctcatgttggcctcctaagctcagaggagaaaaaaaagggaaagaagttcaagaagccacactagaagccactgatcaccatcacctcggcacctgtcctccatctgcccctctttcaagtaaggaccagactcaggggacagcacctgcacctccctttctgtccatgcactgtgtagggagcctccttctgctctcatctcaaggcgactgctccgccaggtcagccgtgtcactgctgagagtcttacctcagtcctggtcacagggtcttggatcagcagcaacctggctttgattcagctgtgaccctgccccttcaggacacaaagccgatgattaaagcctaactgaactctcctagatttctcaaaccttagattctccttctctgtgtccctctagaaagtgccacctctaccaaataatttcatgttatttcctcaggtctagagctatttgattaccaaaattctatactcactcttctgctctcattccttgtcatggtccattttccactcaggagctaatgatgccaaccctgtatctacaggccattgtcacaaaaaaaaaaagaaatgagagggttccttagataaatacagggttagcaaagaaaagtttcattaccccttaggaattactccaagatctaagaaaattaattccagagcttcaagagtttactcctcagaaacaacagcatgaatacattaggtagtgaatgttcttggtcttctcaatgaataacctctgaaaggttcagagtatacgtttcaaaaagataagtgcataactttcacaaaaatgtaatcttaacttatgtcatcaattttaattggtatatatatttctggaaaaaaaagcagtatgatggtaaaagaaatgtaaaaaagcctttgtaaaacccagtgcttacagtccaccaggatagcacctgtgaagcaaattttctttgctgaagatacaccgccttttagaataatagcaagatagtttgaatttgtcttcttctctcacaacaatctaaaaattaacatgatcccatttatatgaaatatctagaaatatatctgtacatgtggacattcccatcgcacacctcccatccaggctgtcctaaagtggcatctcctcttcttctgctcatgttctccccctctcctcacctctcctgctgacacgtggctcctccctgccttcctctccagtagccccagcagatcaggcccaaccagtcaacaagctcctggacttggggaacaaaagtacatcttcttggatttctgaggacttgccctgccagggtgtctttctcaatccaatctctccttcccggcagtccacttctcctagatcctgtaatttatctaatcttattcatctgtatctacttcgtggacttccttacatcttcacctgaacaccaggaatcttcaggtcatgcccatatgcccttggttctcctgtagtcccttcttccttcttcccctgtgatgccaccaagtcgaagtctcttctcagaccctggagtgcagcagggacttctctggtctctgccccagggattaagggggtggaagagtggactcctgtgcccttcctatgcctgtgttttcatcagggttagctgcaaaaggtagggattaggctgtctaggtagggattatggcattaggtagggattatggcatttccagagctgagctctatgcccagcaaaagatacgtgctcagcaactacttgacagagacctacctcttatcacatgggacacattatactggacccaggatggggctgaactgggagaggtagctgtggacctgctcctcgctctgccctcaccctaagagctgatggggcatccaccaggaagagcattcctgggcagggagagggccatgagcagccttgtcctgtatgtgagacacagctcagcccggtcacaagatccagatgactatgactgcaattcaggggaagtagagaatgaagattgaccagaataaccctctgggaatgtgccctgggcctcctagagggaagagcttcccttctattcagcgctgcaggatccacagaggaaggagagccctggccaccagggaggagccacatgagaggacccggtgtccccacaaatgggaacgtgagtccatgaaagtcggtccctgctctgggtttgattgtgacctatgaggacattgtgtagtcaccacctgagtcctctacaataaacagtgagagcgccacggacagattcactcccgaggagcccagtaaagtgggaggactgaggtcacagggagaagacacaggcaccacctggcctggccctgacagggggcagtggacagaacagtgcggaggcagtggggtctctagaggctctggtcaccttgtcataccatggtttgtctcggtctggacactagagggcacttggggatcattcctgagaagactgaggttgatcagagcagaaccagccacctgtcctgcctagtgtcctctgctcagggctcacagctgcgtcctttacacccgtgggaccacacagccccacccctgccaccccctgacatcctcaggcatagggacctgacccagggcccagggtgggattagaaagctgggggtctgatttgcatggatggaccctcccactctcagagtatgaagaggggcagggagagatttggggaggctctgcttcagctgtgggcacaagaggcagcactcaggacaatctccagcatggcctggtctcctctcctcctcactctcctcgctcactgcacaggtgactggatacaggtccaggggaggggccctgggaagcctatggattcttgctttctcctgttgtctctagaagccgaataatgatgcctgtgtctctcccacttccagggtcctgggcccagtctgtgctgacgcagccgccctcagtgtctggggccccagggcagagggtcaccatctcctgcactgggagcagctccaacatcggggcaggttatgatgtacactggtaccagcagcttccaggaacagcccccaaactcctcatctatggtaacagcaatcggccctcaggggtccctgaccgattctctggctccaagtctggcacctcagcctccctggccatcactgggctccaggctgaggatgaggctgattattactgccagtcctatgacagcagcctgagtggttccacagtgctccaggcccggggggaactgagacaagaacccacttcctcctctgccaggagggtgagccccggcagctgctgctcaggcctggcctgtggcttctgcggctgctgcttccctcatggtcccaggggcatccagggccctgcctgggagtggaggctcctcctccccttctgtcctcagagtcaggaacagggaatccaggaagcagaatatccctctcccttaacttgggacacaaagtctctacactgaagttctggactcaggtggcagatccagttgtgtcacctcagacccacctctgatagggaacccatgtattcattattctcctttccccaattccaggagtttccggagtggtgtcttcctctccctgctcctcaatgtgagtccctgtgtttcttttctcccaggcctattctttttttttttttttaacaaaactcctttcatgaaggaaaaatgcacacctaataaaccagctgaatttatagcattaaattcggcccattttggcatttttctggatctttgaaaatatcaccaccactgagctatgcaacctctgactaaccccagcagcccttcatgatgctttgtcatctccttcactccccgaatgccctcctgggcagccaggaatctgcctttgccactactgtatggtttccattttctgaaacttactagtgttatcaaacactatcttcccatttgttcgagcttctttcactctgcacacttcttttcagattctccctgctgttgctgaattgcatcccattctacagagggctcattacaacctttgagggtctaggacattctcttctgattctatttatttacttatttattttaaagtttgaattcattgtccatcaaatcaaactctacgggtgatgttcatctaaggtgacaggagtcagtgagggcttctcaggattcttgcttcttcatctcttccctctaattctttctataatgggagaatttcttatctttttaaagtttttctatttattattttatgttggcttttaaggtttttagtgttttttaaaatttttttatttcaataggtttttgggaaacagatgttgttttgttacataaataagtttgttagtggtgatttctgggattttggtgcactcatcacccaagcagggaacactgtacccaatgtgtagtcttttatccctcaccccatcccaccctttctcctgagtccccaaagtccgttgtatcattcttatgcctttgtgtcctcatagcttagctcccatttatgagtgaaaacatatgatgtttgcccttttattcctgagtgaattcacttataatgatagtctccattccatccgggtttctgttaatgccattatttcattcctttttaaggctgagtagcagtctacatatatatatatatatatatatatatatatatatataccacatttgcttcatccactcattgattgatgggcatttgggttggttctatgtttttgcaattgcaaattgtgctgctataaacatgagtgttcaagtaattttttcatgtaatgacttcttttcctcttggtagatacctagtagtgagattgctggatcaaatggtagatccagttctttaatgaatctccacactcttttccatagtggttgtactagtttacattcccaccaacagtgtaaaagggttcccttttcaccacatccatgccagcatcaattattttaatttttttattatgcccattcttgagggagtaaggtggtattgcattgtgactttgattttcatttctctaatcgttagtgatcttgagcattttgccatatgcttgttagccatttgtatatcttcttttgagaattgtctattcatgtctttagcccactttttgatgagattgtttgtttttttcttgctgattagtttgagttctttgtagattctggatattaatactttattagatgtatagattgggaagattttctttcactctgtgggttgtcagttaactctgctgactgtttattttgctgtgcagaggctatttcatttaattcagtcccatctatttatcttcgtttttaatgcatttcattttggattcttggttataaagtctttgcttaagccaatttcttctagaatttctaaggtttcatgtcttagatttaagtctttgaccaatcttgtgttagttttgtataagatgagagatgaagatccattttcattcttctacgtgtgacttgcctattatctcagcaccatttgttgaatagcgtctccttttcccactttatgtttttgtttgctttgtcaaagatcagttaactctaagtattttgcttcatttctgcattctctattctgttacatcggtctatgtgcctatttttataccagtaccatgctgttttggtcattatggctttatagcatagtttgaagtcaggtaatgtgatgcttccagatttgttatttttgtgtagacttgttttggctaccggggctctttcttggtttcatatgaattttagttctatgaagttctgtgaagaatgatggtggtattttgatggaaattgtattaaacttgtagattgttttggcagtatggtcattttcacaatattcattctatacatccatgagcataaaatgtatttccatttgtgtcatctgtgacttctttcagcagtgttttgcagctttcctggtagaggtctttcactttcttggttaggtatatttctaagtattttagttttttggcagctattgtaaaaggggttgagttcttgctttgattctcagcttggttgctgtcgttgtatagcactgctactgatttgtgtcctttaattttgtatcctaaaacttgctgaatactttcactagtgctagaagcatttggggtgagtcttcagggttttctatgtatacaatcatattatcagcaaacagtgacagtttgacttcctccttatcagtttggatatccctgatttctttctcttgtctgattgctctggctaagacttccagtactacgttgaatagaagtggtgaaagtgggcatccttttgttgttccatttctcaggggaaatgcttttaacttttccccattgagtataatgttggctgtgggtttgccatagatggcttttgttgccataaggtatggtcccttctatgctgattttgccaagtttgaatcataaaggatgctggatttcgttagatgccttttctgcatctattaagataatcatgtgattttgtgttttaattctgtttatatggtgtatcacatttatcaacttgtggatgttaaaccatctctgcatttctggtataaaagcaatttgatcatggtagattatctttaagacagctgttggatttgggtagctagtattttgttgaggatttttgcatctagattcatcagaaatattggtctgtagtttatttttgttatgtcctccctggttttggtatcagaatgatactgtcttcacagaatgatttagaaaggattcccattttctctatgctgttgaatagagtcagaaggattggtaccagttcttctttgaatatctaatagaattcagctgtgaatccatctggtcctggattttttgttgtttgcaattttttttattaccatttcaatctagctgcttgttattggtctgttcagagtttctacatcttcctggtttaacctagtagtgttgtatatttccaggagttcatccatctcctttaagatttctagtttatgtacataaaagagttcatagtagcctttaatgatcttttgtatttctgtggtatcaatagtaatatctcccgtttcatttctaattgagcttatgtgggtcttctctcttcttttcttggttaatctcgttaatggtctgccaattttatttatcttttcaaagaaccagctttttgtttcatttatcttttgtatttttttttgttttgacttcatttagttctgctctgatcttcattatttcttttcttttcctgggtttgggtttggattgttgtggtttctccagttctgtgaggggtgaccttagattttctacttgtgctctttcagactttttgatgtaggtatttaatgctataaactgtcctttaagcaccacttttgctgtatcccagagcttttgacaggttgcattaagatttagaacaattgcaatcttactatcaatcaacagctttttaattcctgaggatgtgacctcatttaatcctgacaatagctttattattgcttttcaggcagtagaccgtgattgaagaggtaatgctttgtggcctggaggtaaggttctaaaatttatcaaatattaaattggtgcacaagtaattgcaggttttacaaataaaagtaatggcaaaacccacaaggacttgtgcaccaatgtgatataaacactggaggtcagttaaatttgaattcagtaaaaacaatgataaagaatctgtatgtgtatcacccacacagtattgttcaattgtaatacaaacaactgggtgccctgcattttatcgggaaactccacacagggttcgcagcttgaaagaggcagagctgtggcaggcctgcccttcctgatgccaggtctaggtgcttaacgtcaaagacagagcttctctaagagagctaccctcaagtgaacatgtcagttggcactaaatacatgtgatatgatccccagtcaatgatccccactcacttccctaattctttctattatcctttaagtttgcagactcagggcctccccagaaattgctgcagcctgagttctggacctgggaccgcatgtcctgtcacaaccagatgcaaaagggctctttagtccctacacagaatggcttcagccaggagagcataaataacatgtaagattagaagagctcagaggggctctccttctgtcccatgacagatgaaacttcagggctctgatgcttgtcagggaatctccttcagtgaggccaagatcccaggactttactaaaattagcagagtggaccagacaggcatgtcatggtacaggaattgtgttcagaacaataagtgcagatgcatcttaacaagggccttcacgttctatctttggtgaaaaaggaaatagacaaaggcatggagaaactgaaggactcaatgggtctgggactgaggtagcgctgagtgctttgggcttgtcctggagcagtctgcagatgataacagctgggaagtccacccctgctgtgaccttgtttcatctgcccactggatcagtggctgtgtcctcacaggaaagctggctgtagccagactggccttctccatcccacctgggaaatgtattcagatgactctctggggtgaggttctactaagggcttgggagttatgaggagggggctgatttgcatgaaagaaccatttcaccccctttccttcatctaaaacccattaatagaaacttcagggccattcatagaagtccagctggtctcctacatttgtggggcataaaggatcaatgcctgatgaatgcctgatcaatctaaaggaagaggggctatcagcaggtagtggtcagagtgagaaaggaactgacttttttgagagattcatcaacacagccaccaactctgggacaaatggggtgactctctgtaactgtcaccccaaattacccacaggacactgagccagtcccctcattctattgcttctggttctagtccattcccctattgtccctaaacacgttgcccatgtctgagtccagggtggcagggatacctccatcccagtcaacatctacagagggcctcttctgttcccctctcacctcatgcaggttactactgttgtgggtctggtggagtggcccctggagaacacaaggtatcccttcctctggaaagccaggcatgtaatagacatggtatgggttgatgtagagcagagtggctcatccagatgcaaagcagtaagaccttggctacagaaaattatttcacaaaattccacaccctttcatgacaaaaacactcgatgaactataaatagaaggaaactacctcaacatagtaaagaccatctatgaaactcccatagtttacatcacataaaatctgaacaaccagagacattttctgtaatatcaggaacaaaccaaggatgcatactttcacatcttcaattccaaatattattggaagacctaggcagagcatttagcctagaaaaagaaataaacagaataaaaactagaaataaaagtataaaattatctctgttttcagatgacataatgtcatatgtagaacgccattaaaagacccagaaaataattctgaaagaatgattaagtgaatttggtaatgtttcaggatacaaaatcaccacttaagaacatctcatggctaggcatggtggctgacgcctataatcccaacactagggaggctgaggtgggagaattgcttggggtcaacagttcaagaacagcatgagcaacaaagcaagaacctgtctctaccaaaaataaaaaaataaaaaggaaggaaagtcacttgtatttctatacttaaccaaacaggacaccacccaaaatgaaattaagaaaacaattcaagaggacccacagaccctctgaaggaaggggactgcacccgcaggacccgggagacaccgcaaatactgtgagtgcctcaactgcggaagtgggaaaaggagaccctcctctcccaaacacacacccctactgaagaatgtgaaagtctgttagcaggagaagttctcaactttacctggaacggagttaagttagacagccaagctcagtgaaatacacaggtgtaggaggtagcggggaggccctgggaacttgctgaatccccaagcaacccattcctttctggcaccacaggaatacatcaggaaggaggacagacaagcagcgggtaaaactccacgggaagaaggacttccctagctgaactttgcaacaattcgaatcgggtgagaggcctcctggctctagtatccatggcactagtatccatggctgagaggcccatggatagttcacatcacaggactctgtgcagaaacccccagtaccagcccagagccgggtagacttgctgggtggctagacccagaagagaaacaaaaatcactgcagttcagctcgcaggaagacatccacaggaaaagggggagagtgctacatcaagggaacaccccatggaacaaaaaaaatcttaccagcctttagccctagacctctcctctgacagagcctaccaaaatgagaaataacttggggggaagagtgggagaggggcgaggagtaaaagacaacaaacatggtacagtgtatactgctcaggtgatggctgcaccgggatctcacaaatcacccctaaagaacttactcatgtaaccaaacaccatcttcccaataacttacagaaaaaaaaaaaagaatattataacaatggaatcatatattatgcagcctttcagcattggcttttttcacggagcacaatttccttgagatatatctgagttgcgttgtatcaattatatagtttgtttctttttattgctgagtaatgtttcatggtacggttgtatcaagcttgtttaaccattcgccagttgaggaacatgtggattatttccagtttatttttttggctattaggaataaaactactatgaacattcttatacattaaaaaaaaaagaaaacaattcaaatttcgtcattagaatgagtaaaatgcggctggcacggtatctggtgcccataatcccagcactttgggaggctgagacgggggatcatctgaggtcaggagttgttagagaccagcctggccaatatggtgaaaccctgtctctactaaaaaaagattaaaaaaaattagctgggtgggtggcacactcagtgattgcagctactcatgaggctgaggcacaataatcacttgaacccaggagacagagtttgcagtgagaggagatggtgccactgcactctaacctaggtgacacagtgagactctgtcccaaataaataaataaatgtaaaatacttaagaataaacttaagaaggtaaaacacttgcacattgaaaacaataaaacattgctaaaagaaattgaagaatacacaaataaatggaaagacgtttttgattatgtattggaaaactcaatattgttaagataccagtagaaaccaaaataaaatatactatagagtcatcacaatctttatcaaaattccaatactacttggtacaagaatggatataattctaaaatccagatacccaaaatagccaaaataatcttgtaaaagaagaacgttgttggaatcctgacacttcctgattccaaagcatactaaaaagatacactaatcaaaacagagtggtacatatagacagacatacagacaaatagaatagaattgagtgccttggagaaaactctcagttatatggtcaaatgattttcaacaagcttgccaagaccattcgtgagggaaagaacagtctttttaacaaatgctgttgagaaaactggatatccacatgcaatctggaagtgaatcaaagacacaaatgggagagccacaactgaatcttaaaagaaaacattgggaagtaggtccacaacgtagggtttggaaatgatttcttggatatggcacaaaaaagacagggaaaacatagaaaaagaagaatatagataaattgcatttcatcaaactgtaaaacttatgtgcagcaaaggacactaccaacagagtgaaaatgcagataatagaatgggaaagattgttacaaactttatatctgataaggcatccaagctatagaaagaacttctacaactcaacagtaacaacaaaaataggaataacccgaaaaaaacaaggacaaaggacttgagtagatattactacaaaaaaagatctacgaatgtccaataagtacatgaaaagatgtacagcatcaccaattattagtacactgcaaatcaaatcacaataatatacaactctatacccattaggatggcattaaccaaataacagaaaattaaaagttctagcaaagatgtttagaaattgcaactgttacgatttgctggagagactgcagaatgatgcttccactgtggatgccttatggctgttcctcataaaatcaaacatagaattaccattttatcagaattttcacttctgggaatgtgcctgaaaaaattgaaagcaagatctcaaagagaaaattgtacatcctcgttcatagcagcattgttcacaatagctaaaaggtggaggcagcccaagtgtcaactaatgaatcaacaagatatattatacacacacaagggaatattattcagccttaaaaagaaagtctgacccatgcgatggcatggatgaacctttaagacatcatgccgtcagaaataagctgacttcaaaaggacaaaaattgtttgccagcccttatatgaggtacctagaatagttaactccacagtgacaagaagtaaaacgatgtttcccaggtatgaagttttggtttgggaaaataaaaaatttgtggagatgagtggcagtactgtggttgtacaacagtgttaatttacttaatgtcactgaagtatacatttgaaaattgttgaaataatgtattttgtgtatgaatattttactacagccaaaaagaggaagatttatgtttggtgcagtttctctacctccaagaacagtggaaacctacaggactaggagagtgtgcatgagtatccaggacactcttccttttatgccagccccacagcatccaggacacccttccttttattccagccctgcagcatcctaacaagttaagagagtcagacgtacctcattacaggtgactcagaataatatgagaaagtctagaggtggccatgatgttagcggtgggtgcccaacccagcccaggagcagccgcaaatgcaacagtggccaaagaaggggagatgaagctggtggcagaggtagcagcccctccagctggagaggggcatctgcttctgtacaaaatggttcacagttgataagtcttgcatagatgcctcatcgtttacctcatgaccaactacagttttcattgcaatgtacgttatcatagcagtaatgtctatttcctcctgtagcaagcaaacatgaacgaaacgtgctttactgctttgtccaacaggacatgttagtcccaaacacaggctgaatgtttaaaggtaacgttctctaaagataaggatattataccatttattgataaatacggggattgcatgatgaccattcagacacttggaataattacttggctaaataacattgtttaaacaatgagtaaatttagttattctttgcagagcaaaaaagatccaagtttcaccagtcccttggcaaacactacatttcaaactatggaagggagacatcctgaaattttgtgctactctttctgaagacacagaaacagtcaagtcatacctaatacttatgagcataaagctttgataaaattcaagaattatttgcattttgaggaaaaagactttgtcgctaaagcagagaagaacctaaaacggactcctcatagtgagctaatattttataaaaaggtgtcaatcaaggtgtggcttacaaaaatactttcaaggatgtttactttccagccatctcactggacaagaactgggtggttttcattaactttggactgtgctttaatttcctaaaaatgatgtcacttactgccctgagtgacatgggatgggatgctgtggtagagcacactctggctgatgtcttgtacctgctggagacagaaaaggatgggagacacagtcctccacaggaaatctcaaatgggtccctctttcttttcagatatggactttctggggagtaatactgtagggcttttcttgttgttgcctttaactgtctcaaatgttctcccaaagatgctactgaacacagcctctcctttgagcaagttaaaagtctgggtacgactgtgagaggctcctgcctgccaacactctttctccactttcagtgactgctcttcttctgagggccgtaaaccaacaactgctcatcccaagatccactaagccctctgggaaattggtgctgtactgcataccctgcctgctgggacttgttacattgatgtattttctaaggagtgaataatcttgtccaagtaactaacttatttaaagacattttcttcggtgggcactgactccatggcacccgttttccaaggagttggtgagcttgtttctgagaatgccagaaatcaatgtacattccaaatcattctaaaagtgatttcttttcggtgtgggtttggttttgttattaattttgaaatatatctttgaatactgagatctctgaaactactagatctctagaagtgtaattgggaaagaaggttgcttgcagctttaacaaaatgagaaactcttcccaaatacaacctgttttgaagttaaaaaaaaatgtgacattagaacctgcaaaatctaagagtttccaacagcagtctcaattctgatgctaactgtaagctagggactcccccaacaacgcttcacttcttatgattcccaagaaggactcacatcactcactgaaacttgtgacgtttgttgatatgattttttacaacaaaagaatgcagattaaaataattcaaggaaggaggtacatgggcagagttcaggagaattccaagcacaggcattcagttgtcctctcccagtaaagtaatagacaatgctgcattctcctggcagcaatgtgtgattctgtgcatgaattattgccaaccaggaaagctcgctgaagcttggtgtccaggcaggtttttttgggggtgtgagttggggatggggttgcttatgtagaccttgttgatcatccttatggctgactccgacttgaatttccactgaattgacaataaaacttcaaccttaaatatttggttattttctttttaataaattctctaaaataaattattttgaaaatgctcgctttagctagctgtttatccaatatgagactcaacataaatagtttcaaaaagccagtgggtcattaaaacaattcctttagtcatccaaaacattcagataaaaattaacaccatgtaacactaaaatcgaattatagtcactggggctggatttcaacaacaggaagagaaagtagtacaaatagggatgagcaaaaaatagacaagtaatggatgtgaattggcctaggaaatttacagtggcaatgtcaaaaaggtaaatcaatagttatttgacaatacatgctcagtccaggaaagccaccagggggcggtctgggtcgtctgcatcataagaagctcaaggagttcaaactgaatgaaccctgcacagttgctcactgggtcgtgtaaaatgttagagcagctgcttcctcccgcaacacacggccactctgggcagtcccctcacagtgtggctgctctcagggctgagaacctgggtggtgctaaaggtggtgaatgtggtaaagatttgcataaagcaccacacaacacacctcctccacacagggatctcagtagcatcttcaaaggatgggctttctgagctaagagcaataagaagaaactttctaaacttactaaaatttatttattgagttatgttcaaagcaatacatgcctattacataaaatcagaaagtatttaaaatcaccgagttctcggcaaaggttctttattccaagcaatcaatatgactatttttttttatttggatgcattctttcatttttgttctcagtatttccacaatggtgatcaagccttgtgctttttcatctgcttttatacccctttatgatctagtcatttcaggttaatgtaagtagtgttccatttcttaaaagggataaaatatttaaatagttgctaattttatttttatttgaataccaatgaaatattatcatttttagataattcttattgtttgctactcaaacgaagatatgatattatcttattattaaaacactcctggtaacttctgtggattttgtgaggtcagaaaaaaaatgcctgaaattttcaatggaaagccttgagtacattacacctgacttcacaatgcagtaaatagagaaacaagagtttccgattcatgtaagaaggagcataacagattaaggtatgaggaataatttatatccaaaactacaccagtgtctccaggcatgtgttagaacagtaccccccaaattctgttgtgcatatgcatcttctggggattttacaaaatgcagattctgattcagtggctctggagtgaggacacagtctctgcatttctagaaagttcctaccacacaaaatccacatatatgtttgaacaataacaaggccagccaggagaagaggctcaggtgtgtaatcctagcactttgggagtttgaggcaaaagaattacttgaggccaggagtttgagaccagccagggtaacgtcacaagatcttttctctacaaaacatgtttttaaataataaaaaatgaattagccaggcgtagtgtggcatgcttgtcatcgtagatacctaggaggctgaggcaggagggtcgcttcaccccaggagttcaaagctgcgatgagctatgattatgccactgcactccagcctgggtgacaaagtgagaccttacctctaataacaaaaacagccataacaaattcataagaatagtgtaaaataaggagaaaccttggcagacaataacctaagagatatctcagacatagtgaactaatgtgtttggatgacagaagaaccccacacttggctggctgtggtgactcaggcctgtaatcccagcactttaggaggccaaggcgggcagatcacctgaggtcgggagttccagaccagcccggccaacatggaaaagccccgtctctactaaaaatgcaaaattagccgggcgtggtggcgcagcctgtaatcccagctactcgggaggttgagccaggagaatcactggaatccgggaggcggagtttgcggtaagctgagatggaacgagccacactccatgcaggaagacgaccagggaggacagctgcaaagcagggagaggctcccctttctttaagaaacaaaacaaaagcaaacaaacaactaacctgacctcccctctggctcccatccaacattcttactagcttctcatctagtcttttctgtagtgtagcccatccttaccctctcccctcccacatctctgattcctgaattcccttcttgggtctctctccttttcctgtcaaccacttctcccctctatcatcctgagttaattatcaagagctttatagcaggaagcctattggtatttttccagattttttttcttggaattggacattcatacattttctctctttttttgggggggtagggtggggtgggggtgggggtagggacagggtctcaccctggttgcccaggctgtggtctcaactcactgcaaccttcacctcctgactcaagcaatcttctcagctcagcatcccaagtagctgtgactatgggcacgcaccaccacaccctgctaatatcttgtatttttggtagacatggggtttccccatgttacccaggctggtcttgaatttctgagctcaagtgatccaccctcctcagcctcccaaagtcctggaattacaggcatgagccgctgtgcccagcctattttttctcttttacgagcctctctgattccctagttctgaagtagcccagagttggctgattctcctattttgcctcagctagcacttcctccttctcctttttttttttctccttctgatccctggagtcctctgcatttccactgaatccagtgaaccacacaagcatgctcatttattctccccaaactccaccactctgccttatgtgctgatccagtgagaatcaagaaggaagagagacccatggatttctgtgcagcctggaaagtcagttcatggctggacttggctgggacaccagacacctgtctccctgtctctatttagtattcatagggcccagcagctgcatcctcccagggtgcctgaagagtcactgaccatgctctcctacccagcctcaagaagccacccagtcctcgagaagtataatcagactcagcatcttatgtgaagggaacaaccatggggacaggttagacttgcattgagtcccctcctctaagaagggccagggaaaaggggctgttccccctaatctgtgtggctcaggaagtagagctccagagacttctctaccatggcctgaatccctctgctgctcaccctcctcagtctctgcacaggaggctggagatagaaaggcagggactggcactgggaggaccagggctctgccttgctcccccggctcaccgagccacttcccacaccctgtgtctctgtcctgactcttagggtcctgggcagtcagggctcacttggtggcctgcacagtttgtctgtgactaaaccagccaccatctcctgcactggaaacagcagcaataacgtccttggaattgtgtcctggtaccaacaatgaacaggaagtgtccttaaacctctgatctgtggatgtaaatatccacctgcagatccagaactgattcttgagtgatcagtctggcaaggaggccttcctgagcatatctgggctccaggctgaggacaaggctgatcactaacgttggatttggacagttctctggaggcccccacggtgctgcagtctgtggggaagtgagatgggaacatttcaggtctcctaggagcacgacccgacagcaccacctacaactgggaaaactgggctgtttaccatttgtgttcatgtttgcttgggctggtgctagccagggcccaggtctcaggtcagggacagtgatttagagaatgcagctttgtttcctcagagtcagccctcagagaaagcccatagcaacagcattgtcaaattgcctcaaaaaaaatcagaaagtccttggttcctggaacaggctgccctaggaacagagcccaatcggtcagagcaagcagggacacaactgtgcagaaaacaacaagttttacttagggagataacggttgactgtataaaatgagaaatatgtcacactactcacttgtaaaagtaagtttaccaatgctattcatttccctatatcactacgttgagtaaaaactctaaaatgtatgaaaccactgtagagataacttttgctgaattgctactttaacatgtcatggatcatttatttttcttgcaaaattctcattattcaccgtccttttgagtaacccccagctgcccttcaacctagctcctcagctgacctcttctccatgatgcctaccctgatggcacatgtgggcagttaggtttttctagattttaaaagttatatatgtacatgtctacatcccatggaccaagactcactctgggagtgagaaatcacaataatcatgcatagccttatggaattagtgtctagcaatcagaccatagaggtgtgaatagagacagtgactaatgagctgcagagatcagctgggccatcaggaggtaagtgtcctctaaccagcatgggatgctgggggactgccctatggtccctacacagctgctcagtaaggaccattcactcaaagaaatccaagactaggggctaagaccccgtgctcactgaggggtacttagcatctatgtcctcccatggcatggcagagtcccctgagcaggaaggtgtgtatggtttcagtaggtgctttcttccggagccctctcaaggggaaaagcaaaacttcttcctcctcagtctgcagtgtgagctgagcttcagccccagagcttagagaggggctgggcagtccctggatgaaaacacatttgcatgagcagcccctcctctgcagagtatgggaagaaaaggaggcctggggcagcccagtcccactgtgcatgtcaggctgtgtccaccatggcctggactcctcttcttctcttgctcctctctcactgcacaggtagggacaggcctcagagatcagggccagccacccaacctgattctggctcttctggtaaagatccctgaaaaacctcaccctgaaccctgcccatcaaccatgagtgtctgtgtttgcaggttccctctcccagcctgtgctgactcagccaccttcctcctccgcatctcctggagaatccgccagactcacctgcaccttgcccagtgacatcaatgttggtagctacaacatatactggtaccagcagaagccagggagccctcccaggtatctcctgtactactactcagactcagataagggccagggctctggagtccccagccgcttctctggatccaaagatgcttcagccaatacagggattttactcatctccgggctccagtctgaggatgaggctgactattactgtatgatttggccaagcaatgcttctcacagtgacacacacagatgggaaagtgggacaaaaacctcaccctgctttaggtcttgttcttaaaaaattttaaattttaaaataactggcctaggcacaaactacatttggaagtactttctagttgtaaaaggctcttctctcaatttcccatccattcgtctgaagtctcagtaaaacaaaacaaaaccaaagcaactgatgacactgaagtcttggctggttgtcatatgtgctaacaccactgcctgtggagctggacttttgttcttgaaagaagcaaaatgaggctttcctagctcacatcatggtcagagcctggggacatcctagcaggtgaacagtgccctgcagcatggactctgctcttccagcgtacgggcagagacctccccttccatccccagtagtctgttctcagggctgtctgtggctcactgtgtcccaggaacaaggcactcaaatatgaaatgctgcctgaggacacaggtcagggaattctagatatagtgctgacctggctcagtcctgggtacctgcatttcagtggcaatgtcaggagatggggttaggtattagggtaactggggacctgagaccagtaaacctctatgtaggacatgacaggagagtcaaggggaggctccactgtggctgagacaagccagaggctgctccttggccacgggggaagtaggtcccatggatgtgactttcctgcagctcatcccactcaggaccatggggactgctgagcgtgggtttcttgatccctcagcgcctgtgttctcttctcctctcttacaccattggagcttcttgctgaatcagggtctagtggtgagtatgtggaaagaccaccacatctcaaggtcacctttttctgcatggggagcagcagaaacattgggcattcccgtggaaatggctacggaggcctcccagaaagagcccccaagtttatgacctaggacagcagtgatggtccctcaggggtcccagcctgattctcctgctctgggtttatccacacagcctcctggagcacctcttggctccagcctgaggactggctggttatcagtgtcacacagctgcatcctgactccatgttaccaagggttcctgttccatgtggaaatgagagaaagatctgccccactcatcctgtctccccatccctcctttatccctgcctgtgaccaacaccagttcatgccaagacttcggctgtcacttgtgttactgaagcagagcacaagttcagtaaaaataatcccttttcttactggtctcccaatgcaaacagaatcaatttgtttctagaagcaaaaggagctgcccacacatggtgggtggggatgaggtagggacaagaaagaatccaccctgtgtgacccagaggcccagaagcctttagtctggttccaaaggtgtctcctcctcttggtgcagttatgctgaccatttcctgagctcagaaactgtgcgagagatgccaagaatgaagaatccagcctgtgtgacccagagacccaaacgtgagacaggaagtctgatgcttaagaaaacgtgggttcagcattctgaaaggtctagatatggcttggcctagagctggtgtagaagagaagcaagagagatgctcagccttaggtggcccaggcacagcggtcctgtcaaggggttgagctctctgcaacatggatatcctgcagagacatacttggggaggctgtgatcccagaatgacacaaaaatgctaatggaaatgagcaggggattgtttatgggggaatggggagacaggtgtgggataagatgtggtaaggagaatgcagcctgaagaggagactgtccattgtgactcataggaggagtagggccggggcctacagtagtgataaaaggaggacctggaaggacctgggccctgaagacacacagagactggagttttggtctgtctgtgagggtcccatgaggataaaaatccatggtcagtgtcctctgtccagggctcactgtcccagctgttgtccctcctggatcctctgggtgtccagattccgtagctgtggacctgttctcctctctgtcctcagcctaagagctgatggggcatccaccaggaagcacatctgtgggcagggagggggccatgggcagccttgtcctgtatgtgaggcactgctcagcctcggtgatccctgttcattaacgtgggaggaaaggaaaacaaaattcactgtgaacatctatgcatcatcaaagaaaaagcaatgagccaaacaggaagtgaagcccagctctaatagtttgtttctacttggaaataaataaaacttaatatgcctgatgtgttacgtaaatgcaataaacattttttgaaagctataaaaattatgtaaaggaacatggcttacactaaaaggaacacttaaaataatgacacccttgaaatgcaatcccaaaacacagcatacattttatttcagttccatatatggactggttttatttaaatgtctatattaaatctcactattccatttttaaatggagcacttaaaatctcattctacggcaactgcctggtgatacatttaccagtggaaatatcaacaaaaccatccagctgttttcctccatccccatagaattccccaaactagtaattattaagagcccaggatgtatcatgccagaattcatgcagtcgtaggcataacctgtttcatttttcattctgatcaacagaattacaatttttcttaagcttgtttttagcttattagattctagttgtcattacagatcaaagataaataattttctatcatccttaagccacccccataacactcactactgaatttgaaccataatttttccctaaaaatcctagttggggtgcttgatgttgagagctaccacgtatcaggctcacctgaggacagactctggttaaaccaagttaaaattttaattcttcccatcttcaaagactgagcatctttgctctttttgttcataagtgaaacactccaaagtcatttgccaggatcccctgcagatgagcatttagtgtacagactcctaggcaagatccctggtcacagtatccagatgactatgactgcaaatctggggaagtagagggagaacaaagatttaccaggaaaaccctctgggaattcctccccagggaatcctagaggaaagagctccctttctcctcagcgccacaggatccacagaggaaggagagctctagccaccaggaaggagccacatgagaggagaggacctggtgtccaacacaggtggggaggtgagtccatggggctggtccctgctatgggcttgatcctgacataggactttatgtagataccacctgagtcctctacaatgtacagccaaagagccatggaaagattcactcctgaggagtctgaagactcctcagtagagcgtgaagatagccctgaagtcacagggaggagacacagacaccacttggcctgccttggacctgagagagggggcagtggacagaatggggggaggaagccatgtatctgagaggttctggtcaccttatcatagaatggtttaccttgatctggacaccagagggcgcatggggatcattcctgagaagacaggggtgatcagagcagaaccagccgcctgccctgcctggtgtcctctgctcagggctcacagctgtgtcctccccaccccctgggaccacaaagctccacccctgccaccccctgacatcctcaagccaaggagcctgacccagggctcagggtggggtcacaaacctggggggggtctgatttgcatggatggactctccccctctcagagtatgaagaaagggagagatttgggggaagctcagcttcagctgcgggtagagaagacaggactcaggacaatctccagcatggcctggtcccctctcttcctcaccctcatcactcactgtgcaggtgacaggatggggaccaagagagaggccctgggaagcccatgcgaccctgctttctcctcttgtctccttttgtctcttgtcaatcaccatgtctgtgtctctctcacttccagggtcctgggcccagtctgtgctgactcagccaccctcggtgtctgaagcccccaggcagagggtcaccatctcctgttctggaagcagctccaacatcggaaataatgctgtaaactggtaccagcagctcccaggaaaggctcccaaactcctcatctattatgatgatctgctgccctcaggggtctctgaccgattctctggctccaagtctggcacctcagcctccctggccatcagtgggctccagtctgaggatgaggctgattattactgtgcagcatgggatgacagcctgaatggtcccacagtgctccaggcccagggggaacagagacaagaacccccttccttttctgccaggagggtgagccccggctgctgctgctcaggcctggcctgtggcttctgctgctgcagcttcccccatgggtccagggatatccagggccctgcctgagagtggaggctcctcctcccctgagtcctcagagtcaggaacagggtgtccagaaaacaaaagcagggtgtcctgctccctgtagcttgggacacagggtctctgcactgaagtcctgggctgaggtggcaggtccagctgtgtcatcacagacccacttctgttggggaacctgtgtctccatcatcctactttttccatttccaggagtttccagagtggtgtcttcctcccccttctcctcagtgtgaatccctgtgcttcctttctctccagcctattctttttttaataaaactcctttcatgtaggaataatgcacatataataagccacccatatttacaatagggaatgagacaaattttggcatttctatggatccttgaaaacatcaccaccaccgggagctatacaacatacaacctgtgaccaaccccaatagctcctcatgacccttgtcacctcattccctcccccaacaccctccttggaagttgcagatctgcctctgtcactactgtttggtttctcttttctggaatgtatcagtgttatcaaacattatcttcccatttgttcaggcttctttcactctgcacacttcttttgagattctcgctgttgttgctgcattgtacccatctcgtagagggctccttactatctttgaaggtccttaggccatttttttctgattttatttatgtatttattttaaagtttgaatttattgtgcatccaaatcaaactttaggggcaatgttcatctaaggtgacaggacagtctgtgatggcttgtcgggattcttgcttcttcatctcttgcttctgattctctctatagtggaagaggttctcgtctttcatttatttatatatttatttatttactgatttatttgggtttttaagggttttagtgatttttctctttttggttatttttcaatttttttattttaataggtttttgggggacaagtgttgctttgtcacataaataagttctttagtggtgatttctgagattttggtgcactcatcacccaagcagtgtacactgtacccaatgagtagtcttttattcttcacccccctcctaccctttctcctgagtccccaaagtccattgtatcattgttatgcctttgtgttctcatagcttatctcccactgatgagtgagaacatacaatgttttgttttccattcctgagttactgcacttagaataacagcatccagttccatccaggtcgctgtgaatgccattattttgttccttttatggctgggtaatattccatggtatgtgtatgtatacatcacatttgctttatccacctgttgatttatgggcagttgggctggttccatgcttttacaattgtgctgctataaacatgcgtgtgcaagtatcttttttgtataacgacttctttttctctgggtagatacctagtcgtgagattgctggatcaaagggtacatctatttttatttccttgaggaatctccacactgttttctgtagtgactgtactagtttaccttcccaccaccagtgtaaaagtgttttgttttcaccacatccatgccaacatctattattatttttattttttgattatggccatttttgtggtagtaaggtggtatcacatcgtggttttgacttgcatttccctgatcattagcgatgtcaaacatttttctatatgtcttttgtccatttgtatatcttcttttgaaaattgtttattcatgtctttagtccatcttttgatgggactgcttattttttttcataatttgtttgagttctttgtagactatagacattagtcatttgttggatgtatagattgtgaagatttgcttccactcggtgtgctgtctgttagctctgctgattcttttgctgtgcagaaggtttttagtttaattaagtcccatctatttatctttgttcttgttgcatttgcttttgggttcttggtcatgaagtatttgtctaaagtaatgtctagaagggtttttttaatgttatcttctagaatttttacagtttcaggccttaaatttaagtctttgattcatcttggcttgatttttgcataaggtgagagatgaagatccggttttattcctctacatttggcttgccaattatcccagcaccatttgttcaataggatgtcctttttccactttatgtttttgtttgctttgttaaagatcagttatttggctccatttctggattctctattctgttcctttggtctacgtgcccacttttgcaccagtaccttgcagttttagtgactgtgagtcaaattatgctagagtatagtttgaagttgggtgatgtgatgcctccagatttgttccttttgcttagtcttgctttggctatgcaggtcttttttggtttcatatgaattttaggattgttttttccagttctgtaatgaatgatggtgatattttgatgggaactgcattgaatttgtggattgcttttggcaccatgatcattttcaacatattgattctacccattcatgagcgggggatgtgtgacatgattttttcagcagtgttttgtagttttccttgtagaggtctttcacctccttggttgggtatattcctaggtgtatttttttgcagctatttgtaaaaaggtttgagttgttgatttgattctcagcttgttcactgttattgtataacagagctactgatttgtgtgccttacttctgtatcctgaaactttgctgtatttatttaccagttctttttttttttttttttttttttgagatggagtctcgctctgtcgcccaggctagagtgcagtggcgcaatctcagctcactgcaagctccgcctcctgggttcacaccattctcccaccttagcctcccgagtagctgggactacaggtgcctgccaccatgtccggctaattttttgtatttttagtagagacggggtttcaccgtgttagccaggatggtctcgatctcctgactttgtgatccgcctgcctcggcctcccaaagtgctgggattacaggcgtgagccaccgtgcctggccatttatttaccagttctaggagatttttggatgagtctttaaggttttctaggtatatgatcacattatctgccaacagcaacagtttcacttcctctttaccaatttggatgtcctggatttgtttctcttgtctgattgctctggcttagacttccagtactatgttgaatagaagtggtgaaagtgggcattcttgtcttgttccagttctcaggggaattgtttccaacttttttttcctttcagtataatgttgactatgggtttgaaagagtgggcttttcttaccataaggtatgtctcttctatgtcaattttgcaaaggcttttaaccatgaagtgatgctggattttgccaagtgctttttctgcatgcattgagataatcatgtgatttttgtttttaatgctttttatgtggtatatcacatttattgacttgcatatgttaaaccatccctgcatccctggtatgaaacccacttgaacatggtggactatgtttttgatagctgttggatttggttagctagtatttcatttattatttttgcatctatgttcatcagggatattgttctgtagttttcttgttttgttatgtccttccctcattttggtatgagggtgacactggctacaaagaataatttaggaagaatttcctctttctccttcctgtgaattagtgcattagtcagggttttctagatggacagaactaatggaatctgtatatatatagcatgatcacaacatcccacaataggctgtctgcaggctaaggagcaaggagagccagtccgagttccaaaactgaagaacttggagttccatgtttgagggcaggaagcatcaagcataggagaaagttgtaggctgggagcctaggcccatctctcttttcatatttttctgcctgcttattttctagccatgctgttagctgattagattgttcccacccagattaagggtgggcatggctttcccacccactgactcaaatgctaatctcctttggcagcaccctaacagacacacccaggatcaatcctttttatccttcaatccaatcaagttgacactcagtattactcatcacaagtccaccccttgtcaacttcaacccatatatatcttctgagatcatacataatcttcaaataaagacaataataaggtcataatgacacctaacataatacaactatcattcatacaaacagaaacacatcaatccccaacccaaatactgttacataaagttaacgatacttaaacgctgatgtgaagtcaataaatcttatgtcacatgataaaggagaaaggaaataacatgaagatattttcttaggacaaaggtatacacgcacaaacatgtttttaacaaaagaaggaggaaatactcatgacaattacactcctcgtttctgcagctggccatagctggtattgatgattactttcttctactatccattctgtattctgtattccctttgccttcagcaagcacctcagcaggtcgtggatatttttccagatggtgtgatccaaatcttcattcctgaagcatctggttcatttgtagtcctgcctggatagggctgttttagttttccatggaccttaatcacagggcatgataatactaagaaatgccctaatggatctcctgtattccatgcatactcttccttacctccgttatggagtagtaaactgatttcatcttgatagtctgtcccaaacaccccagccaacactgtaactcccttcttagcctgttgacttaaaggtaggaggagcccaaagtgtccaggtggcaatcttaacttccccagtttaatggaatcattgatgtgtctccaagtggcagtgttccttcctctggaactaaatcctctaagccagcagaacataatgtcgtgggaacaggaagcaaaaattttgctagtggatcactaggggtgatggtgagtgctgccacttccacttccaccccttgattcctagactcatgaatcctggctatgggagaaacagtgccatatattggatgctgactcagagcatacacgccttctggggaacttagccccagcactgcaaagtattgtcacctagttgacattgtaattgtgacttcaaaaggccattccattgttctatcaatccagctgcttcaggatgatgggaaacatggtaagaccagtgaattttatgagcatgagcccactgctgcacttctttatgaataaagtgagtgccctggcgagaacaatgctatgtggaataccaggatggtgaataaggcattccatgagtccacggaggatggtagtcttacaggcaaacccatatctggaataagtgtctatatcagtgaggacaaacctatgcccttctcataatggaagatttccaatataatcaaccttctaccagatagctggctgatcaccccaaggaatggtgccatatcaagggctcagtgttggtctttgctgctggcaaattgggcactcagcattagccatagctaggtcacccttggtgagtggagagccagttcgagttccaaaactgaagaacttggagtatgatgttcaagggcaggaagcatccagcacaggataaagatataggttgggagggtaggccagtctctcttttcacatttttctgtctgcttatactttagccatgctggcagctgattcgattgtgcccacacagattaagggtgggtctgcctttcccagcccacttactcaaatgttaatctctttcagcaacaccctgaaagacacacccaggatcaatactttgtatcctttaatccaatcaagttgacactcggtattaaccatcacaattaatgtcataggattagtactaattcttctttgaatgtctgatagaattcaactgtgaatctgtctggtcctggctttattttgttgattttttttaaattaccatttcaatcttgctgcttgttactggcctgttcagagtttctatatcttcctcatttaatttgggagggttgtatacattcagaaattgatccatctcctctgggctttctagtttatgtgcatagaggtaatcagagtagccttgaataatcttttatatttctgtggtatcagtattaatatcttctgtttcatttctatttgagcttatgtggatcttctcccttttcttggttaatcttgctaatggtctattaattttatttatcttttcaaagaaccagttttttgtttcatttgttttttgcattgctttttgtttcaattttatttagttctggtctaatcttcgttatttcttttcttctgctgggtttgggtttgccttgttcttgagtctccatttccatgaggtgtaaccttagattgtctatttgtgctctttcagactttgtgatgtatgtatttaatgctaaacattcctcatagcactgcttttgctgtatcccagaagttttgataggttgtattaagatttactacaactgcaaccttactattgaacaatagctttttaattcctgagagtgtgacctcatttatgcccaaaaacaactttatgattgcttttcatgcagtaggccatgattagagagggagtgcttgtggcctggaggtagggttctccaatttatcaaataaaaacattggagtgcagttaaatttgaattcggtaaaacaatgacaaagaattagtatgtgtatctcccacatgatattgttaaattgaaatacaaatttacctgggtgcgctgtagtttatctaccaactcctcacaggcttcgaggcttggaagaggcagtgttggggctggtctcctcttactgatgccaggtctatgagctgaacctcaaaggcagagtctctctaacacagctaccctccagtgagcatgttagttagcactaaatacaccatatacgatttccaatgaataacacctactcacttccctaattcttctttctattattctccaagtctgcagactcaggacctccccaggggttgctgcagccagagctctggatgagggacctcataagtctttcaaaaccagatgcaaggggactactcggtccccacacagtgaggtttaagccaggggtgcataagcaacatgtaagagacagaagagctcagtatggctcttatggctctccttctgtccagtgagaaaactccagggtccttttgatgctgaaggtgggtgggctgagagtaggaggagacccaccctgacagcccagagattccaggacaagacttggcagcctgaaaaggggccacactcttgagtggggaagaaggaggcaactctgctcacaggcgtgcatttctggtggcttcccctttaccaaactggactccctactctgatgtctatcagagaatctccctcagtgagaccaagatcccaggacattgctaaaaacagcagcatggaccagacaggtatgtcatggtacaggaattctttgcagagcaataaatacaactgcagcttaagaggggccctcatagtcataactttggtgaagaagaaaatagacaaaggcagggagaaactgaagggctcaataggtctgagactggggcagcactgggtgctataggcttgtccttgaggggctgcagataatgacagctgggaagccatcatctgttcactgctcactgggctcagcagctgtgtcctcacagggaaccagattcagccaacctggctttctccaccccacctgggaaatgtattccggtgactgtctggactgaggttctatgaaggggctaggagacaagaagagggagacaggctggtttgcataaagaaagcattgcacaccctttcctttcatctaaaactcattaatggaaactctggggccatccatagaagtctagctggtctcctaaatttgggagttatgaaggattcattcctgatcaatctacaggaagggccatcagcaggaggtggtcagagtgagggagaaactggcttccttgagagactcttcaacacaaccaccaactctggggcaaatggggtgacttgctataacagtcatcccaaactactcacaggaacctgagcctagtcccctcaccttattgcttctgattctggtccatgcctctgttttccctggaccccttgcccatgtctgagtccagagtggcagggatggttccatcccagtcaacatctacaaagaagtctacatctacagctactatgacttgaagcagagtccacagttgtacccaagagggcctcttcagctcccccaccccttcacacaggtgacctctactgtaggtctggttgagtggcccctggaccctggtgaacacaaggtatttattcctctctaacaccaggtatatagtggagcaggtctgggtgggtatagagcagagtgtctcttccaaatgtaatgcagtaagaccctggctacagaaaatcatttcacaaaactccacgccctttcatggtaaaaacacccaatgaactatgaatagaatgaaactacctcaacacagtaaagaccatctatgaaaatcccacagctagtgttggccgggctggtctccagctcctaacctcgagtgatccgccagcctcggcctcccgaggtgccgggattgcagacggagtctcgttcactcagtgctcaatgttgcccaggctggagtgcagtggcgtgatctcgtctagctacaacctccacctcccagccgcctgccttggcctcccaaagtgccgagagtacagcctctgcccggccgccaccccgtctgggaagtgaggagcgtctctgcctggccgcccatcgtctgggatgtgaggagcccctctgcccggctgcccagtctgggaagttaggagcgcctcttcccggccgccatcccatctaagaagtgaggagtgtctctgcccggcagcccatcgtctgagatgtgcagagcgcctctgccccaccgccccgtctgagatgtgaggagcgcctctgcccggccgcgaccccgtctgggaggtgaggagcgtctctgcccggccaccccgtctgagaagtgaggagcccctccgcccggcagccaccccttctgggaagtgaggagcatctccgcccagcagccgccccgtccgggagggaggtggggggccagcccccgcccagccagccgccccgtccgggagggaggtggggggtcagccccctgcccggccagccaccccgtccgggagggaggtgggggggcgcctctgcctggccgccccttctgggaagtgaggagcccctctgcctggccaccaccccgtctgggaggtgtacccaacagctcattgagaacgggccatgatgacaatggcggttttgtggaatagaaaagggggaaaggtggagaaaagatagagaaatcagattgttgctgtgtctgtgtagaaagtagacatgggagacttcattttgttgtgtactaagaaaaattcttctgccttgggatgctgttgatctatgaccttacccccaaccctgtgctctctgaaacatgtgctgtgtccactcagggttaaatggattaagggcagtgcaagatgtgctttgttaaacagatgcttgaaggcagcatgctcgttaagagtcatcaccactccctaatctcaagtacccagggacacaaacactgcggaaggccacagggtcctcggcctaggaaagccagagacctttgttcacttgtttatctgctgaccttccctccactattgtcctatgaccctgccaaatccccctctgcgagaaacacccaagaatgatcaataaaaaataaataaataaataaataaataacaaaaaaaaaaaaaaagaaaatcccacagctaacatcatatgcaatctgaaagaccaaagaggtttttgtaatatcaggaacaaagcaataatgcacactttcaccagttctattaaaagcagtattggaagacctggcaagagtaattaggcaagaaaaagaaataaacagaataaaaattagaaataaaaaataaaatctctgttttcagatgacataatgtcatatgtaaaatgcccttaaaagtcccacaaaaaattattagaatgattaaatgtattcagtaatgttttataatacataatcaccttgtaaaaacatctcatggctaggcatggtgactcatgcctgtaatcccagcactttgagaggttgaggtgggaggatttcttgggttcaagagttcaagaacagcctgggaaagaaagcaaggctctgtctctaagaaagcggtggggggtggggggaagagagaaagagagagaaagagagagaaaagaaagaaagaaaaagaaagagagagaaagaaagaaagaaaggaaagaaaaagaaagaaagaaagaaaatctgttataattctatacttaaataagcaaacaggaaacaactcaaaatgaaattaagaaaagaaatcaaattacaacatcattcgaaagagtaaaatacggctgggcacggtggctcatgcctgtaatcccagcattttgggaggttgatttgggggtatcacctgagattagaagttcaagagtagcctggtcaatatggtgaaaccctgtctctactaaaataaataaataaataaataaataaataaataaataaataaataaataaaatttaaaattagctaggtgtggtggcacatgtctgtaatcccacctgctcggggttgaggcacaagaatcactcgagtatggtaggcagaggttgcaatgagccaagatcctgccactgtactccagcctgggtaacagagtgagacaatgtctcaaataaacaaataaataaagataaacgagtaaaatacttaagaataatattaatcaaaatggtgaaagacttgtacattgaaaactataaaacattgcaaaaagaaattaatacacaaataaatggaaagaaatcctttgttcatttattggaaaactcaatattgttaagctaggcatacaaaccaaaaggaatctacagattcattgcattctctatcaaaattccaagttagtatggagatcattaaaaagtcaggaaacaaaagatgctagagaagatgtggagaaataggaatgcttttacactgttggtgggagtgtaaattagttcaaccattgtggaagacggtgtgatgattcctcaaggatctagaaccagatataccatttgacccagcaatcccattactgggtatatacccaaaggattataaatcattctactataaagacacatgcacatgtatgtttgttgcagcactagtcacaatagaaaagacttggaaccaacccaaatgcccatcaaggatagactggataaagaaaatggggcacatgtacaccacggaatactatgcagccataaaaagggatgggttcatgtcctttgcagggacatggctgaagctggaaaccatcattctcagcaaactaacacaggaacagaaaaccaaacactgcatgttctcacttataagtgggagttgaacaatgagaacacatggacacagggagggtaacatcacacaccggggcctcttggggatgggagctaggggagggatagcgttaggagaaatacctaatgtagatgatgggttgacaggtacagcaaatcaccatggcacgtgtatacctaggtaacaaacctgcacggtctgcacatatatcccagaacttaaagtatatattttttaaaaagtgcaagccaaacaaacaaacaaaaagaatagaaaaaaattaatcctaaaatttatatataatattgagagaatctaaatagtcaaaatcatcttgtaaaagaagaacagtgttggagatttcacaccgatttcaaaacatactacaaagctacactaatcaaagcagagtggtacatatagacagacatactgacaaataaaacagaactgagtgcctaaaaaaacctcttagttatacagtcaaataattttaaacaaagttgtcaagaccatttagtggaaaaggacagtctttttcacaaatactgttgagaaaactggatattcaccagcaatctggaaatggatgaaagacccaaatggaagagccaaaactgtcaaaatcttaaaagaaaacattagggagaaggttcataatatagggtttggaaatgacttcgttaatatgacaccaaaggcacagaaaaaaatagaaaaagaagaatatagataaattggattttatcaaattgtaaaacttatgggcatcaaaggacactatcaaccgagcaaacatttgaatcatagaataggaaagattgtcgcaaattttgcatctgataagagatgcagactatagaaagaactcctaccactcaagagtaactacaaaaatgaaaacaatctgaattatatgggcaaaaaacttgagttcgtattgagtagactccaaagaagatctacaaatgggcaataagcacatggaaagatgttcagcatcactaatcattaggccagtgaaaatcaaaccacaataatatacaactccacacccattaggatggcattaccaaaataatagaaaataacaagatctagcaaagacgtatagaaattataactgttatgcattgctggagggactataaaatgatgcacccattgtggaggtcttatggcatttccccaaaaaaattaaacgtagaattgccattttatcggaattttcagttctgggtatgtgcctcaaataattgaaagcaggatctcaaagagaaaattgtacacccttgttcatagcagcgtcgttcacaatagctaaaaggtggaggcagctcaagtgtcatctaatggataaacgggatacagtatacacacacaagggaatagtattcaaccttaaaaagaaagttctgctattctgaataatgccgcaataaacatacgtgtgcatgtgtctttatagcagcatgatttatagtcctttgggtatatacccagtaatgggatggctgggtcaaatggtatttctagttctagatccctgaggaattgccacactgacttccacaatggttgaactagtttacagtctcagtaaactattgcaagaacaaaaaaccaaatgccgcatattctcactcataggtgggaactgaacaatgagaacacatggacacaggaaggggaacatcacactctggggactgttgtggggtgggggtaggggatagggatagcattgggagatatacctaatgctagatgacgagttagtgggtgcagcgcaccagcatggcacatgtatacatatgtaactaacctgaacattgtgcacatgtaccttaaaacttaaagtataataataataaattaaaaaaaaaaaagttctgactcatgcgatggcattgatgaaccttaaagacatcacgccagcagaaataagctggcttcaaaaggacaaatattgtttgcttgcccttatatgaggtatctagagtagtcaaatccatacagacaagaagtagaatgaagttttccaggtgttaagttttggtttgggaagatgaaaaatttctggagataaatggtggtactgtggttgtacaacagtgttaatttacttaatgacactgaagtatacacttgaaaatggttaaaataatgaattttgcatttgaataatttaccactgtacaaaagaggaagatttatattcagtgtagtttctctaccaagaacaatcaaaacatacaggattgggagagtgtgcctgagtattaggacacccttccttttatgccagcctgcagcttcctaagaggccaatagagttggaagcgcctcattactggtgactcaaagtaatgtgagaaagtctgggagtgaccatgatgtaagtggtgggtgtctgacccagcccaggagcagccgcaaatgcagcagctgccaaaaagggggagatgaaactgatggcagcagtaacagcctctccagctggagtggggcatctgctcttgtgcaaaatggttcacagttgatacatttagcacagaatctcatcctgtctacctgtcatgatcaactacaatttttattgcaaagtatgccatcagagtggcatattttatccagcagcaagcaaacatgaaggaagtttcccttagtgctttggtcaaactggcatggcagtcctgaacactgaatgaatatccaaagacaaggttctccaaagataaagatattatactatttattgataaatactgggagtgcatgatgaccattcagacacctgggaaaatgacttggctgaataacattgttaaaacaatgagtaaaaaaagagatgtgctcttggtaaaggaacacctggatccagggtataaagaccggaaagaagactaccgcagatttggacttttggatcaggacttggtaacattgaccctgtttacgacaaccaaaaacaaagcagtgctgtgtctacagtgggaatctgagtcaggaaactgcagcaggaacagcagaaaaaaggaagaggagctcagtgcaaacagaaggatggggagaccacagggaccaccaagaaggcccagagtgactttttgttttccgctcagggctgtcctcctcacaccccttggatcacacatttaatgaagacggctactggtatagtctaacttagcctgatcctcacacggttggtcctcagaagcttgaaattaactgctgggcaggaaaacctattcctggagacctctacagtgactgcttctatgaacaggttttgttagatcaacatgattaagctccccagttagagatctccagtgactggctggctgactgtggttggaaagaaggtctactttatggtgcagacctctcatgggatacggaaagggtcctggtactttgaaatcaccatgaatgagatgccaccagacaccactgccagactgggttgatctcagccctaaggtaactatgaagctcccttaggttatgataaatttagttattattggcagagcaaaagggaatcaatttccaccagtccactggcgaacactactgttttagctatgggcagggagacatcctacgattttatattaatcttcctgaaaacccaagagacagccaagttaccaagataaggctttgataaagttcaacaattatttttattttgtggaaaaagactttgtggctaaagcagggaagagtctaaaacagattccatatagtaaaataatattttataaacatggtgtcaatcaagatgtggcttcaaaagatatttttagggggttacttttagccatctcactggacaagagcttcatagtttccattaactttggactgtgctccaagtatcctccaaagaatctcacttactgccctgtgagtgacatgggctgggatgctgtggtagagcacactctggctgatgtcttgtattttctggagacaaaagaggatgggggcacagtcctccatgggaaccctgaacaggtccttctttcttttcagatatggactttctggggaataatattgggtggcttttgttgttgttattgtttttgaactgtcttaaatgttctcccaaagatgctacagaacatagcctatccatttaccaagttaaaaggctgagtaggactgtgagagatgccctgctcatcatcattcttcttccacttccagtgactgctcttatattctttgccataagccaacaaccgctcatcccaagatctcataatccctctgtaaaactgatgctgtactacataccttgccagctgggacttgtaatcttactgtattttctaaggagtgaataatcttgtccaggtaactaacatatttaaagacattttcttctgtggacactgactccatgccacctgttttccaaagaagtggtgaagctgtttctgagaacacctaaaatcaatggttgtacattccaaaccaatctaaaagtgatttccttttgctgtgggtttggttctattactgatttggaaatatacctttgaacactgagatctctgaaactactagacttctagaagtgtaattgtataagaagtctgtttgcagctttaacaaaatgagaaactcttcccaaattaaagctttctttgaagttaaaaaaaaaagaataatgtgagattggaacctgtgaggtctgaggattcccaagagtactctcaattctgacgctaattgtaacctaagggctccccaacagcccttcacttcttatgattccctagaaaaactcacataactccctgaaacctgtgacatttattgatacaaatttttacagcaaaataatacagattaagataattcaagggaagaggcacatgggcagagttcaggagaattccaagcacaagcacccagttgtcctctcccagtggagaaatagacagtgcttcattttgctcacagcaatgtgtgattctgtgtatgaaacacctatttcctgggtgagccaaccaggaaagctcacccaagcttggtgtccagagggcttttaaggggtggtctgggtgagagtggggttattatgtagaccttgtggatcatcctcaaggctcacttcagtttccattgaattaacaataaaacttaaaccttcaatctttggttattttctttttaaaaattctctgaagtaaattattattaaaattctcacttaagacagctgtttatccaatatgaggctcaatataaacagtttcaaaaagtcagtaggtcattaaaacaatttcttcagtcattcaaaccattcagataaaaattaacaccatgtaatacaaaaattgaattatagtcacagggacaggatttcagcaatggcaagaaaaagtagtgcaaataggaatgagcaaagaatagacaagtaatgggtgtgaattggcctcggaaataccatggtaatgtcaaaaagataaatcaattgttattttgttaaataagtgaaaggccaggcattctcagtccaggaaagccatcacagggcagtctgagtcttctgcatcttaagaagctcaagaggttcaaacttaataaaccctgcacagttgctcactggttcatgtaaaatgctagagcagttgcttcctcccactcagcaaatccacagcacacagtcaccctggtctggcccttcacagtgtagatgccctcagggctaagaacctgagtggttctaaaagtagtaaagatttgcataaagtaccacacaacacaccctctccacatagggagctcagtaggacataaagagccatcagaatccagccccgactctggagccaggagtcccttctaatatcagcatcatggcctggactcctctccttctccttctccccatgtacctcctcacttgctgcccaggttaatagagatttcaaataccagcctttggagggattcctgtgtctccctttctaattcccaacatgtgtctgttttttgtttcagggtcaaattctcaggctgtgatgactcaggaaccctcactgactgtgtccccaggagggacagtcactctcacctatggctccagcactggagcagtcaatgggggtcattatccttactggttccagcagaagcttggccaagcccccaggacactgatttatcatgcaagcaacaaacactcctggacccctgcccagttctcaggctcagtccttgggagcaaagctgcccagacactcttgggtgtgcagcccgagaggtgaagctgagtactactgcttactgcaccatagtcgtgcttggcacagtgacagactcagaagaggaaccgagacataaacctctctaggcccttgtgatatgaagatcatatgatcacgcacaccagctctcaaggcagcctacatgtggaccagccatagaaaggggaaggaaaggatctgaattgattcctatccctgcttaagccctgaagtgaaggaaatgtgagaatgatctgggaagaactggatcaaaaaaaaaatcagaagtttattgctttgtattctaaaaggagcactaacagctggatcagatctaaaggctgaggctaaatgcatttcctccagaaagaagcatcttcaaagtatggggtttctgagctaagagtaaagagaagaaactctacttttgtatatttctaaagtttgttttattgagttactttcaaagcaatacatgcctattatgtggaatcagaaagtattaaaaatcaccaagttctctgcaaagctaccttatcccagataatcaatagaagtacatttcttcatttggatgcattctctcatttttgttgtcaatattttcacaatggttatcaaaccttgtgctcattcctctggttttatacagctttttgctctgtcatttaatgttaatgtaagtagttttccatttatttgaaagggtaaaatatttgagtagttgctaattttatttttatttgaataccaatgaaaaattataatttggggtaattcaaattgcttgtcagacaaagatgtgacattgggctattattaaaatgctcctggtcttctctgtggatttagtgaagtcaaacaaaatgcctgcaattttctatggaaagccttgagtacattatgcctgacttcacaatgcagaaaatagagaaacaagaatttcctgctcatgtttgctggagcataatagattcaggtacgaggaacaacttatattgaaaactacgtcaatgtctccatgcatgtgttagaacagtacttcccaaactctattgtgcatacaaattatctggggattttataaaatgcagattcttattcagtgggtctggagtgaggacacaatctctgcatttctcacatgtgcctgccacacaaaatccacatatatatttgaataataacaagtccagccagcagtggaggctcatatgtgtaatcttagcactttgggaagctgaggcaaaaagattactcgaagccaggagtttgaaaccagccaagagcaacatagcaagatattttctctatagttttttttaaataataaaaaatgaattagccaggcatagtgctgtatgcttgtagccctaagtactaaggaggctgaggcaggaggagagcttcagcccaggagttcaaacctgcagtgagctatgatcatgccactgcacttgagcctgggtaacagagtgagaccttgtctctaataataataagaaaaacgacaacatatccataagactagtatcaaataaggagaatccttggcaggcaagaacctaggagaaatctctgacatagggaatttaccagcttgcatgatagaagaaccccacactccatggagggagatgaccagggaggacagctgcaaagctaggaaaggctcccctttctttgagagcaaaaacaaaagcaaacaaacaacaaacctgaccttccctctggctcctgtccaacactcttactggctcctccttcagcctttcctataatgtggcccatccttaccctctccccttccacatctctgattcctgaattcccttctttgttctctttccctttgctaccacccacttctcccctctaatctcttgagttaattatcaagggctttataacaggaaactcattggcattttttctgcatctgtccttgaagttgacactcatacttttatctctttcttgaacctctcagatatgcttagaactgaagaagcccgaagttgattgattctgttttttcacctcagccagcaccttcttcttctcctttccaggagaatctgtatttctctgtatttccagaattctctgtatttccagtgaatctgtcagacacagtaagtactcttcaaaggtttaatttctgacttcattgttctttgttctcgagatgaacttccttgtcccttctcctaagctacctgctctgtaaacaacttctcccaccagtcccaatctgtaactcacatctcctccttatttagaaagagtcctcttttactccttgctacccattctgtaaactgcccctcccacaaaactacccttcccacatttgccatgccctgacatgcccaaacataccttgtaccataatggactgcctctcccttcccacctaattagccatactcaattttaaacagtagccaatcaggtcagtttagattgtgtggtccaactccagccaatggggacaggacacagaagcagggactaaccacgttagggatgaaaaccccttccctcctttgtttggtgtgctcttgcagtggtcagaagtgcaagcggcactcttctgtagaaataagtttgccttgctgagaaatattttgtctgagtgctcattttccttgcgactctgagctcttgtttctaacaaaatagggggtcatctgggattcccattctcctctgaggaagggcctctgatcacctcttaggaggagatgcatcccactgcttcattgcagtggcctcaggggtaaggaatcaggacccacccagcatgataaataaacccagactctcagcaacacaggaagaaaaggcctacagttaccgtggcgaccaggtaactgtgcacagacaaaggtaagaaaaaccactagggcagtgaagtacttccttagtggtcaggacattctgcaggttgaaaatgtgtgaatgagatgcacaattaagtgcaaagtgagtgtggagtaaagtaaagggtgcaagaaatctctagtaagagaggttgagccccagggaaatggtgcaagaaatctctagtaggagaggttgagccccacgcacactcagcagggaaaggagagcgagaaacctccagtagcggggattgagcctccagggaaaagggtgcaagaaatctttaatacgagagattgagcccccattaacctccaagacgggagtgcaagaaatctctaatatgagagatatgagcccccattaacttccaggatatgaaataccctagtaaaacaagaactacaaagggcaaaggagataacacaattccctctgatagccttctaggtctcatgttaaaatattggagggataatgaaaggactaaacacaagaaaaagcaacaaatgatcaaatatgggaattgttttatttggaccaaagaacctattctcaaaccttcagttttctggccaaggtttggatcaaatgagagttggatttgtcaacttttaatagagtatgtaaatgacaaaagtcctgcttcccaagaggaaatagactctgctgtgtcttggtggcaggggccggtcctcctctacccccttaaaactagtaaggataagccagaaactaattcccctgtaggaactaaggccccacccctgagcaatccatgtgggatcccttagaccatctgcctccaccagatacccctaacttctctcaagcagccacccagacccttcccctgctcacattatgccctccctccttataatcctgactgttagggctgtccccaacctgaacgccctcctgcaagaaggcttcaacgtgagatagagcaatgtaaaaaggatattcaaaacttccctttcccctcctcctcaaaagagtctgccccaatcgtttttcccttaagggaagtgtttctaggaggagagggagttggctttgtaaatgtccccttaactagttcagaggtcagaaacctgagggaagaacttaaaccactattagattatccttttggggtcgtggatcaaattgaccaatttgtaggatcacaagtatacacttaggctgagctaatgtccatcttaagtgttctctttccgggggaggaaagaaccatgatacagaaggctactatgatagcctgggagtgcaaatatcctcccagtcaaaatacccctgcagcagaacaaaaatttctggcccaaaacccccaatgggataataacaatgcagccaactgagaaaacatgaaagaccttagggaaaaggtagttaaagggattcaggaatcagtgcctcaaacccaaaatatttcctgagcatttaatatacagcagggaaaagaccagggagccatggagtttttaaacagactcaaggaacagatgagaaaataggcaggcttaaacataaaggatccccttaggcagggatgttaaaactccattttgttactaatagttggccagatatcatgaagaaattacagaaaatagagacctggaaatatcggcctatagagggaacaagagggcagggagaggagagagaaagactgacagagggaacggagggagccagggagagagggggggagatacaaaggcagaaagagagagagggagggagagacagagaggcagatagatggagaggcagagagacagtgaggaaaagtcagagacccagacagagagggagagaaagagaggcagagggagagaaagaggacgaaacaaatgtttcaaatgtgaaaaaataggtcacttcaaaagagaatgtcctgaatgggaaaaagaaacaaaagtcatatataaaagcagatcagctaatattaaatttctgttaattccagaggcaggaacatatctattagggagagatttaatgctaaaatttggcttaggcctttatattaatcagggaaaatttctcatctccttaaacctactcaccaccacggatgaagagcgtatccatcctgacacatggtcaaaagaagaaaattgggggaaattacagttcctccaatcaagcccaaattaaaaactcctggggaggtagtaaaaaaccaaaatctttcttttgaaagctgagggaataacctcacagaccaaatagccaaacaagctgccatttcctctgaaacgcccatgtttcacctcaccccttgcctttctcccccaaccgccattgccatcttctcccctgctgaaaaggagaaattaataagaataggaaccaaggaaaactcagaagggaaatgggtgttaccagatcaaagagaaatgctatccaaacctctcatgagggaggttttatctcagctgcatcaaggaacccactggagacctcaagctatgtgtgatgcagttcttagagactatggatgtataggaatttatactctagcaaaacaagctacagatagttgtttaatatgcaaaaaaactaataagcaaaccctaagaaaaccatcctttggaggaagaaacccaggaaattaaggccattccaaagcatccagatagattacaccaaaatggcctcaataggtcacctaaagtatctaccagtaatagtggatcaccttactcgctgggtagaagctattcccttttcaagtgtagccaccagtaatgtagtttagacattaactgaaaatattatacctaggtttggattaatagaaaatattgattcagataatggaaactatttccctgcacatgtcattaaaaagctagcccaagtattacaaataagatgggaataccatatccctggcacccacctttatcagaaagagtagaaagaatgaaccaaatcctaaaaagccacctaatcaaactagttttagagactcgactaccttcctattgcctaattgagggtccgaactgcccctcggaaagatattggcttatctccttaagaaatgctatacgggttgccttatttacactccactgctgacattcctacatttgaaactaaagatcaatttctcaagaactatataattggtctgtcttccactttctcttccctcagaactaaagaccttttagcactgacaccacccttggagctcccagcacatcagcatcagcctgggatcacattctcatcaaaagctggaaagaaggaaaactcgaaccggcttgggaaggacactatctagtgcttctaactacagaaattgctgtccgcacagctgaaaggggatggacaccccacacacaagtgaaaggagtgattttcacagcgagagaaaaatgggccgtcaccccagggcccacccgcaccaaattaaaaagggctgaataatcatttgtttattttcccttttctttccaacagaaagtcacctcatcatcagtgtgcctcaaactaatcgtcccttaaccctccagttcgatgcttgttcagtcacctcatgtagagatgaacgagctcaaaggcagctatcaaatgtagataagtatctgtgtccgtaccgtagtgagtcaaccaagtataagtatagagccttaaaaagtccctgtggtgactggacagatgtttggtggaccacccaatatggagggtggacagccaggccccctttttcaaacaattctgaggactgaaacagaaactccaacttattcgtggtaccaccccaccaaattgtaagtcattgcagtgtaaccccttattgctaattatagataatccccaaacaatgacccaagaaccctccatattcgaatgatatgggttaggagcagatgttacaggacaggaccccataggaatcttctttctgaggttggctagaccatcagttaaaaacaataaagaaatccagacccagagtccagggaacctatgggagccaatgctctccccaaacatatcaggctcagcattctcttctcatctccagaatgacccaactaaggtaatggttgtggaggtaaaagatttaaagcagactacagctctagagacagggtacaaagacgcaaatgcctggctggaatggattaaatctcctgtccacactctaaacaaaagcaattgttacacttgtgcacatggcaggccagaggccctgattgtcccctttccacttggaaggtcctccagccaaccaggcatgaactgtatggtagctgtcttccaacaccccacagcctggggtaatgaattatgctgaactctctctctgctatttcctgaagtccagcaccctgtgggtcagcccctgagggccatccagcttctgtctcctgatgcaagtttcaccccatgtctctcacgacaaggggaaaacttagcatttcttggagacctaaagggatgcagtgagcttaagccattccaagagctgatcaatcagtctgccctgatccatccctgagcagatgtatggtggtattgctgcggaccattactagacacttccaagtaactggagtggcacttgcactctgatctaattggccatccctttcactctgacattttgtcaaccaaaaaggataaagacaaagcatcataaaacaaaagatgctcctcatgggtcctttgactctcatgcttatatagatgtcattggagtccagagaggagtgccagatgaatctaagccccaaaatcagatagttgcagggtttgagtccatactattctggtggttgactgtaaataaaaatgtatattggataaattacatctattacaaccagcaaggatttgttaactatactagagatgctattaaaaggatagctaaacagttaggacccaccagccaaatggtttgggaaaatagaatagcattagacatgatactagcagagaaaggtggagtctgtgttatgagtggaactcaatgttgtacttttatacctagtaatactgctcctgatggaaccataacaaaagcattacaaggtcttactgctttatccaatgaagtagctaaaaattcaggaataaacgatcccttcactaatttaatggagaaatggttcagcaaatggaaaagacttatgtcctcaatctttacttctcttgacattgtaataggtttgcttattcttgtagaatgttgtatcataccctgcacctgaggcctactacaaaggcttattgaaacaactctcactaaaacctttttcaaatccaccgcccccccaccttattcagataagctcctacttttagaaaaccaagcagaacaacagagtcaaggcatgttaaaaaggtttgaagaggaagaattataaaaatcaaaagggggaaactgtcagatacagtaagttcctcttaaaaggcttaatttctgaattccttgttctttcttcctgagatcaacttccttgtcccttctcctaagctacctgctctgtaaacaacttctcccaccagtcccaatctgtaactcacatctcttccttatttggaaagagtcctcttttactcctggctacccattctgtaaactaaccctcccacgaaactacccttcccgcctttgccacaccctgacttgcccaaacgtaccttgtaccataacagacagcctctcccttcccacctaattagccatattcaattttaaatagtagccaatcgggtcagtgtagattgtgcagtacaactccagccaatggggacaggacacagaagcagggactaaccacattagggatgaaaaccccttccctccttcatttggtgtgctctcgcagcagccagaggtgtgagtggcacccttctgcagaagtaaatttgccttgccgagaaatcctgtttgagtgctcattttccttgtgactctgagctcttgtttctaacaaatccagtgaaccacacaaatatactagccaattttctccaatccccaccattctgccttatgtgctgatctagtgaggaatcaaataggaagagagacccatggatttctatgcagcctgggaagtgagttcatggatgcactcagttgtaacaccagacacctgtctgccgtttgctgtttagcattcacagggcccagcagctgtgtcctcccagggtgcctggagcatcactgaccacaccctcctacctcccacccacctactcctcaaaaagaaaaatcagactcggcatcttatgtgaggggcacagccaggggtcaggatagatttccactgagtcccctcccctaagagacaccagggaagaggggttgttccgcctaatctatgtggctcaggaagcagagcactacagacatctctaccatggcctggaccctctcttcctcaccctcctgagtctctgcaaaggtggctgtgacatgactctgatgactggagaaacaccagggtcctttgtctcacactgagaaaattagtgacatggacacacattgagtggttttaaggaacagaaagtttaataggcaagaaagaagaaaacagctcccccatacagagggaggagggatcctaatggaaaatcccacatgcaatggaaaacagctgattatattgggaggctggaggaggcagtgtctgatttgcaaagggcccaggggattggtttgaccaggtgtgacattcatgcagcctgtaaaaaaaactggccctcccaccttagccttttaatatgcaaatgcaggtcaccatgatgtcctgcacatgtggcttttatctggaggctgccatgacacctggcacacgtggtgacaaaaagaggagggcgaaagccaccatattgggtggacctggcttctagccaccagcatttgcatatcagtgcttgccagtctggtttttcaagctgctttctgttagcaaagaaatggtttgggggtcgctttttattaaaggaaaattccaccgagaacttacaccatttctagctgcctaaaaattatttcttaatgactcctgttatttcccccctcaggagaagtaaacctaactgtcgttaggggatgttggacaacaattctttctggctacttccttctggaaaggggcgtcatgtaaggggacagcagttgggcctcctcctgaggttgatctaaggattctctgaagaatggcatgtccatgtgtggctctgtctgcagcattatttggagtttgattgcttctaggtgaaaagagataaatcttacaagaaggtttaaaatatagggttagaatatgagtattaagattaccactgttagtgggggtactatagaccacaactatgacagcagagtttgatacttgttagttacaccagtggattgtaatactgggttgtctccactagatgtcactgaatattaccagaaagattaatatgaaagtgacatttttccttgagaaaaccatacatttccccctttacttgccattagtgaatagttttaggcttagaccatttttataacttgcaatataattgggagaaatacattattgggtggctaaattaactttagtgttaatcttgacaattccttttctttaattattaaattatttcatgactttcacagaccctcttacaacatactcaaactttccgacttgtcctaaacatccttcctttaaataaccagtcatttgcttttaggacaagaatttcccacacaagatcttttcttatataaagttccttcttttataaccttctttctatagcttagagtgcaccatacaaccagtcttcaataaaaagtcctatcaaacttaatgatagtaaaactttcatgctatatccataactattactcctgctataagcaaaacagccttgactaaatctttcctgcaattgttaatcctgttataaggatgataattagacaagatgttacagcaattagaattttacaaccagaattccacattgtgagtgccatagtgtatagttctattgcaaatagtagtgtgactgtaacaattcccacaagactggcatagtaaataatttccattgaaaactttacttgccaagatataacatttccctttgggaatctacaaggttacaaatgcaattctatgaataatcaaaatctccctgcgaatatgcattaaaaagaagttctaatatttggtggcaaatttttagaggaaggggtacaaataataaaaagtggccgggcatggtggctcacacctgcaatcccagcgccttgggaggctgaggtgggcagatcacgaggtcaagagactgagaccatcctggccaacatggtgaaaccccatccctactaaaaatacaaaaaaattttgggaggctgagacaggtggattatgaggtcaggagatcgagaccgcctgtagtcccagctgctcgggaggatgaggcaggaaaatggcatgaacctgggaggcagagcttgcagtgagctgagatcgcgccactgcactccagcctgggcgacagagcaagcctccatctcaaaaaaaaaaaataaaataaatagctgggtgtggtggtgcatgcctgtaatcccagctactagggaggatgaggcagaagaatcacttgaacccgggaggcagaagttgcagtgagctgagatcatgccattgtactccagcctggtgacagagcaagactctgtctcaaaaataataaataaataaaaagcatctggtgaggtaggagtgggactgagtaggatgagtagccctcactcagttacttatcttttatgattttcagcttaagatcttctatttctccactttgatattcaggacgttcctctgggctgtcaggggttgctccctcaggcattcaggctttgacttgagtgtgatgtattcagaagttgacacctgtaacttttgctgccaagggggttgaaagagaacagtgtagggcccttcgcagcttggcttagggaaggagagagaggtgagagttttcactagtaccaaatttcctgggttaaataaaggtggttctatttcctggggctgggcttctgccagttgtgtcaatttctgttggaagtgaggtagagaggttacatgcttaaccaatttataggttttctgcctgaaaacagtctctgagcacattgacaaattttatcctttcctaagtgaaaagcttggtgaaggattttaagaactttccattggctggaggctggcaaatggagtttgccatcctctggctgtagccatcctgagagataaaaagcatacccttgagaagtggcctattctgtttctgcaggaaaatactgaggtttaatttctgttatggagcattcctagattagaagggggcttgaagtgtgttaatgccttgaggcttccttgcctttgacttagctgcctgattaatctatttcctttggctactttatttgctgccttttggtgttcctataatgtatccctgctatttctcacggcataaaaagtgaagataatagcctgctaattttctggtgatattttacaggaaatccattagtggtaagaggatgtctttccttttaaatggcagcatgagtatggagagctaagaaagcatacttggagtccgtgtaaatgttggctacctttcccttgcttaattgaagtgttctcgtaagagctattagttcagctaattaagtgcttgtgtctggggagagatgttgtttagagtgactactgcttatcctgccttatgtatttcttgctttaccggctgttagttaaaagcgccccctaaaggacagtaatcctgccacattacgtggggtgtaaacagttaagttctttcccaggattaatttggaggcttttctaactgtaaagctatcatgacaatggcttggaagcatgtgtaaataggtcctcctaactgcaactaaggttgagaaaaatattgtactagagtttttcctgagatgttccttatggtgatgctatgagaagaggggaggcctggattagagagaagaaaagagagagattggctttagtatttagaaggacatctactttccttcaatttccagaatcacccaggtcctggcaccctgttaaatgtgccacccatgtttgcaagcgtgaccctccaagccatggcaccagaggaactaagcttgtgggcctagtcgtgctaccccaagcagctctagtcctctgcctatgatttccctttgacttcctagacttgtgtgatctgtgtgtctcaccccacccccacccccaaaaaaatagatcttggcagaaactatatggaaggaaaggctcctttaatggagggaatgtgctagattgcctgctattatggcctgtgctaaagcatttacccttagaaaaatggttccagttaacttccagacttaaaatctccttactaattaagtactgttttaatcggagagagaacaggtgtcttaaaggaacgcggggacctaatggcgactttcctgctaatgggacagtatcggggcacaaattcggctgcagaggaattttactcctaatagttaaaagcagaattttcccgttcacaggagcagcataaatcctggtttccagtagaaaggtgcaaaaagaaaaaaattgagaagctgcggtgtaccgcggagatcagcaatgtgtcgcataaagaggattttatttccactaggtggcgctgttggcctagaaataccatgtgctcaccagaggaattttagggagtaacctcactgaggggcaaaggaagacttctgttcctagaagattgcaatggcattttcctgagctatctccccagttactacagcattttctgatcttgcctaccaggattacttccctacgctgtaaaaattcccgcacatttgacacacagagagagtaagagacataacgaccacggataaaaaaggaagaaggttctgcgacaggatagctagggatcctttaccaacatccagagcaggccgttggaggctgggtccagtcccgaaacctttgaataacaccaggctgtgccctggccagaaattctcagttgcttcagaacttttcccagcctcacgcgatggctaagtttccccatgaaaagaaactgatttgaagcatgaccaacattcccaaagacccgtgagtattgcgggttctccgtgttctgaccagcaagcctaacactcaagtctttagaacaacagccatgataagcgtatttagacggccaatggatgcccataattgatttgattttgattttaaaatagagaccaagaacctctgaatgacagaacagactttgagttcactcctctaatcactacgtcgatgaatgttgtaccttggattcccagtgaaggcaccagaaaggatacggctctgatgactggagaaacaccagggtcttttgtctcattctgagaaaattagcaacatggatggacatatgtggagtggttttaaggagtggaaagtttaacaggcaagagagaagaaaaacagctcccccatagagagggagaagggctccgaacggaaaaccctacatgtggtggacagcagctggttatattgggaggctggaggaggcagtgtctgatttgcacagggcccagggaatgagtttgaccaggtgtgtcattcacgcagcctgtaaaaaaactggccctcccaccctagccttttaatatgaaaattcaggttgccatgatgtcctgcacatgtggcttttatgtggaagctgccgtgacacctggcacatgtggtgacaaggagaagagggcgaaagccaccatattgggtggacctggcttctagccaccagcatttgcgtatcaatgcttgccagtctggtttttcaagccgctttctgttagcaaagaaatggtttgggggtcgctttttattaaaagaaaattccaccaagaactttcaccctttcttgctgcctaaaaattatttattaataactcctgtagtagctggagacaaggaggcagggatggcactgggaggaccagggctcttccttgctcccctggcttactgagccacctccctcaccctgtgtctctctcctgactctcagggtcctgggcagtcagaactcacttggtaacctgcacagtctgtctgtggctaaaccagtcaccatctcctgcactggaagcagcagcaataagggtcttgggattgtgtcctggtaccaacaatgaacaggaagtgtccccaaacctctgatccatagaagccaatatacacttttagggatgtaggactgattctcaagctatcagttttccaaaaaggccttcctgagcatctctgggctccaggatgagaacaaggctgatcactaatgttggcattagtgatcatgtttgtgatttgctataaaatcatccagcgatggagtaagatgatgggtaaaaagggttgaaagattaaacaagatgagtcacactgatgatgtcaaagctagctgatgggtgccaaggattcattagacaactctcagcatatttatataactcaaaaatttccataataatcactgcctaaaaaaatccatgtctgtgatgagaggtatatgtcctgcttttaattggtatgtaacctgattttaacaatgtggtatataatctgcttttaacaacgtggacaaaatgtaagcttacattctgacttcaagttgaagcccatcttctcctaacaggcaaaggaggagctggggtggaggctatgaaagggaccggagctcagcgtttcccaggacaaagaagtgagtgaggccggagtcccagcagaaggacgaggggctgtgagatgggctatgggagtgtgcaggggccacaacgtgcaggtcatgctgctggggccacaggattcaggttttatataaacaacaaggagccactgaaggtgtttaagccagggagtgacatgccacatctgaatgagaagcatctctctgaattccttgaggagacagtgtctgaaggaagtgagtgacctgattctagattatttactaaagcaccttgtaagtctagaaatccaggggccatttacaattagcacaagtgtagatgtgggctacattgaagaagtgatggtctcttgtcattcttcacagaactagaaaaaacaatcctaaaattcatatggaaccaaaaaagagcccacatagccaaagcaagactaagcaaaaagaacaaatctggaggcatcacactacctgatttcaaactatactataaggtcatagtcactaaaacagcatgacactggtataaaaataggcacatagaccaatggaagagaacagagaatccagaaataaacccaaatacttacagccaagtgatatccaacaaagcaaacaaaaatatagagtgggaaaatgacaccctattcaacaaatggcgctgggataattggcaagctagatgtaggagaatgaaactggatcctcatctctcaccttatacaaaaatcaactcaagatggatcaaggacttaaatataaaatctgaaactataaaacttatagaaaataacatcagaaaaactcttctagacattggcttaggcaaggatttcatgaccaagaacccaaaagcatatgcaacaaaaacaaagttcaataggtggaacttaattaaactaaagagctaaagaaaaaaaagagcttaattaaactaaagagctaaagaactaaagaaatcaaaataatcacttatagaatgatgaaatcggtgtctgggaatcagaacatggatgtgtgaatacagacagtgactggtgagctgcatggcaaaaggaacatcagcagagtaaacagacaacctacagagtggggaaaattcttcacattctatacatctgacaaaggactgatatatccagaatctacaaagaactcaaacaaactagaaagaaaaaaaaaactcatcaaaaagtgggctaaaggcatgagtagataattctcaaaagatgatatacaaatggccaagaaacatatgaaaaaatgctcaacatcactaatgatcagggaaattcaaatcaaaaccacaatgagataccaccttaccacctgcaagaatggccataattaacatataatagatgatggcatagatgcagtgaaaaaggaacacctctacactgctggtgggaatgtaaactagtacaaccactgtggaaagcagtgtggagatttttttaagatctaaacatagaactaccatttgatccagcaatcccactactgggtatctacccagaggaaaagaagtcattatacaaaaaagatatttgcacacacgtttatagcagcacaattcacaactgcaaaaatgtggaagcaaccaaaatgcccacaactcaatgagtgaataaagaaacaatatatatatgatgatatactactcagccattaaaaggaatgaattaatggcattagtagcaacctggatgggattggagacttattctaaatgaagtaactcaagaatgggaaaacattgcatgttctcactcagaagtgggagctggccaggagtggtggctcaagcctgtaatcccagcactttgggaggccgaggcgggtggatcacaaggtcaggagatcaagaccatcctggctagtgtagtgaaaccctgtctctactaaaaacacaaaaaaattagctggccatggtggtgggtgcctgtagtcccagctactcaggaggctgaggcaggagaatggtgtgaacctgggaggtggagctttcagtgggctgatatcatgccattgcactgcagcctgggtgacagagtgagactccatctaaaaaaaaaaaaagaagtaggagctaagctatgagaatgcaaaggcagaagtgttacgggaagtcagggaccccaaagggagggaccggctgaagccatggcagaagaacataaatcgtgaagatttcatggacattcattagttccccaaattaatacttttataatttcttacgcctgtctttactgcagtctctgaacataaactgtgaagatttcatggacatttatcacttccccaatcaatactcttgtgatttcctatgcctgtctttactttaatctcttaatcccatcatctttgtaagctgaggatgtgtgttgcctcaggaccctgtgatgattgtgttaactgcaaaaattgtttaaacaacactaaatctgggcaccttgaaaaaagaacaggataacagtgatgttcagggacaagggagataaccattaggtctggctgcctgagagccatgtggaacagagccatacttctcttctttcaaaagcaaataggagaaatatcgctgaattatttttctcagcaaggaacagccctgagaaagagaatgtgttcctaggggtaggtctctgaaatgaccgctctaggaatgtctgtcttttacagttgtagataagggatgaaataagccctggtctcctgcagcgctcccaggcttattaggatgaggaaattcccgcctaataaattttggtcagactagttgtcttttctcaaaccctgtctcctgataagatgttatcaatgacaatgcgtgcccgaaacttcattagcaattttaatttcactccggtcctgtgatctcgccctgcctccatttgccttgtaatattttattaccttgcgaagcatgtgacctctgtgacccacaccctattcatacactccctcccctttgaaaatcactaataaaaacttgctggttttgcagcttggggggcatcatggaacctgccgacatgtgatgtctcccccagacacccaactttaaaatttctctccttccctttatttctcagaccggccaacacttagggaaaatagaaaagaacccacactgaattatcgggggcgggttcccctgataagaagaatgacacaatggactttggggactcaggaggaaagggtgggaaggagggaaagtggtaaaaactataaattgggtacaatgtatactgctcgggtgatgggttcagcaaaagctcacaaatcaccactaaagaacatactcatgtaaccaaatatcacctgttgatattactcctatcaacattactcctacctgtgtctgtgtatctttgtcatgtgacttatcccccttgactttgtgcttggccctgttctcactttgagtaatggaacatttgtggaccttatgcaagctcaagtttaaatgtccttgcaccacttggtttgccctcttttgcaactctcattactaagatcttgtcctggatagtttttggcccttcaggctgggtttccaaataaacacgtgtgagtaataaatgctgatatttgtgactgttacatagcaatatatgaatgatacatctaacataaagcagacactggatattggtgtggtgagtgaaaacactcaggcttgtatgtatgtagattcctctcccacagagggcagtcatcaatattaccaactcaactaagaggatgattcttatttggtgcagtttctctaattccaagagcagtggagaagtctaataccagggcagtgagcacgaccatctgaacaactcttccttttatgctggccctgacgcatcctaacaggccaagaaacttggaagtgcctccctggaggcagctgggagagtgatgacagatcgggctacgtgggtgatttatttatattcttctattgtctaagatggatatgtttatttaaaattggaaataactgctataattaaagcattgaataaaactaaaattaagaattaaaaatttatatattctccaacatcctatcagtcaaagaaaattacaggtgggtattaaattgtcagataaaagaagaactttcagagcaaaggaaagaaatgaatatttataatctccaagcattgcatgtatattttctctaattctaccatttggctacattttaaggtgccctaaaatttgctttttttttttaaattttctttcgctttccaattctatctcattatcacccatgaagtcccatctttatttttttaacaacaaaatattaggagaaaattaatcatcatttaatccatttatttttatttatttatttttgagatggggtcttgctctgtcatccaggctggagtgcaatggcacaatcacggctcactgcagcctctgcctctggagctcaagtgatcctcccacctcagccttccaggtagctgggactataggtgtgcgccaccacacctggctgagtttttaaaatttgtatagagatggggtctcactgtgttgctgaggccggtctcaaactcctaggctcaagcaatcctcccacctgaacctcctaatgtgctgggattataggtgggagcaataatcatttaatctaaaattctctcagatgagtaggtatgggaaaatttttaaaaaaataataatattaaaataataatataatctaaaacctttttttcacaaatatatctcaggcccaaattttcatccgtccatccatacattcatcaattcattcactcaaccatcaaacatttatttatttatttttttgagacagagtctccctccattgcccaggctggagtgcattggctcgatctccactcactgtagcctccgcctcccaggttcaagtgattctcctgcctcagcctcccaagtaactgggactacaggtgcaagctaccacacttggctaattttttgtatttttagtagagatggggtttcaccatgttagccaggatggtgtcgatctcctgacctcgtgatctgcccacctctgcctcccaaagcgctgggattacaggcatgagccaccacacccagcccatgaaacatttattaagggcccattctgggtgacatattatgttaggttggactgtgagggtataaatacaggacaaatgagaagggttccttctgtcaaggagaacacactcgaagatactagaaataaaatagaaacttctacgctaattactaatacagagaattaccagatttttgaaagctcaactaataaagcaaccacccttttctggatatatcaagaaagtgtctgccttggatgtgggatcttagaaaaagaagagtaagtatggaggaaatgaggtcatctccaacagagggactgtgtgatagtatggactgcatatttctgtctcccccaaaattcttagattgaaaccctaaccccccatgtgatagtatttggaggtagagcctttgtgaaataattaggtttagaagaggacatgagagtggagccctcatgataggattagtgtccttaaaagaagaaaaagagactagatctttctgccatgccaggctacagagaaaggtgccatctacaaaccagaaagtggaccctcgccaagaaccaaatctgcaggcaccttgatcttagacttcccagcctccagagctatgagaaataaaggtttgttgtttaagccatccagtctttgctattttttttatggcagcctgaactaagacagcctggcaaacacaggaaaggaagctataaaagggcacaatgggctgggtgcagtggctcacgaatgtaatctcagcactttaggaggccgaggcaggtagatcacttgaggccaaggagttcgaaaccagcctggccaacatggtgaaactccatctctacagaaaatacaaaaattagccaggtgtggtggtgggagcctataatcccagctactcaggaggctgaggcagaagaatcactttagcccaggaggtggaggttgcagtgagccgagattgctccactgcacaccagcctgggcgacagattgagactccgtctccaaaaataaaaggcaccaatgactgtgtgttgagtgaccaattgtgttgagccatagaggaaagatgtaggcaccagtgacttgtccaggatcagggatgacacacttctttttcttgatagctattctgtcctctcccagacattttttttttttttttaacactgctgtcgcccaggcaggagtgcagacatggctcattgcagcctgaacctcctgggctcaaatctcccacctcaggctcccaagtagctgggaccacaggcatgtgccactatgcttggctattttttttttttatgtttcgtatagatagggtctcgctatgttacccaggctggtcctgaactcctggcctcaaatgatcctcctgccttggcctcccaaagtgctgagattgcaggcatgagccgcctcacctggcccctctcccaaactttcttttgaggttaaataatgtaaaaaggaagagtgtgtagaacaaaagtaatagctaatgtaaaaaaaaaagtttaaaacaaaaattatccatatctcactacttagagataaccattatatatattttgacaacaaatacccttctggatttctgcatttgctctgtcagatgttagttgaggtgggacagggaaaggggttaagggaggaggcaaggaaagaagggtcagaatgcaatttatcttacgaggcgttttcccatttagtaatacataatcaacatctctgcatgttttcaagtatataaagctccttagatcattacttattcatagtattacagggattctatgttttctctattataaactacatgttgttgaacttctttcaaactacatctattcatacagcaagtcatttactttgtaaaaattcctaaacttaaatatctggttcaacacaagtatgcaaaattttgtacagattttatttaccatagaactatggctacaaattaaatgaaaataatagtaataaattataataatataggagtcacctcacagatgtttccagtcacaaagtaaggcttttcctgctttgtacttaagttgaaatccccccaaagtgcataaaggcggatacatcctttctagggtacccttttcaccctgtagatgaaccctgacgtggccaactgatctaccgacagtagtacactctagatgtcttttattaaaataatagataatagagtaatccacaaactaggaccttacacacatacgcacagagcaaaagctcctgaggtgcagagcctacaggaaacctcatcaaaagctctgatggctcctgtcgatgagcacctttaggaggggctgctgttgtcttaagtcagaacagagatagtttgtgcctctccattttgaaatgctccagatttcccttccctgtcttggtctctcagagcctaatgtctgtgctggactagcatagtcagtctttggttatgtgtctgtattttctatttaaagtagtctaggctgggtgcagtggctcacacctgtaatcccagcactttgggaggccgaagtgggtggatcacaaagtcaggagttacagaccaccctgaccaacatggtgaaaccccatctctactaaagatacaaaaaattagttgggcgtggtggcgaatgcctgtaatcccagctactcaggaggccgaggcaggagaatcgcttgaacccgggaggtagaggttgcagtgagctgagatcacaccattgcactccagcctgggaaacagggcgagactccatctcaaaaaaaaaagaaaaaaaaaacattagtcggggtggcggcgggcgcctgtaatcccagctactcagaaggctgaggctggagaatcactgaacccaggaggcagaggttgcagtgagctgagattgcaccactgcactccaacctgggcaacagagggagactccgtctaaaaaactaaaataaaataagatactctaaagtaaattatttaaataattctcatcttaagcaagcagtttattcagcatgaggttcaaagtaaataacttcaaatcagatggtcatgaatataacttctttagtcattcaaaacactcagataaacaagacggataacactgaaatgaaatacagacaatgcagtggattttcaacaataactacaaaaaggactgaacaaagagacaaacaatgaatgtgggcttgcctaggaaatacagtagaaatgtcaaaaaaagttaaatgaatgagaggggtactacaatcctccaccccaggaaaccacagcaaggtgccgtggatcctctctgaagcctgacgttcaggttgttcatattttaggtaccctggacacttgctcataggccctgcaagaggttacagcagctgttccctcccacagggcaaagccagatctcacagccacctaggcctccccatgacagggagttgctccctgggacaaagaccagaataggaggaggagggagagataaaaggctcagatttgcataatgtgtcccacaaatacctaacctttatgcaagaggtgaggagggcataaaagagccattagagagtccaacactagctgtgaggccagtgggcccttggaacttcagcaccgtggtctagactcctctcctcctcctcactcagtcactgcccaggttcacagagatttcagatcagcctttagaatgattcttctgccttcttttgggagaaagtgggtctaggaaaaatagaatgcaaatatttttccaatccatagggaacaataagaggtatactagatgaagagtttatggtcaaatattttttcaaaaaaaaaatctctctatgatgtaattctgactgataatagcaaagaaaacaagctccttattttatataaaaaatttttctttttttttttttttttgagatggagtcttgctctgtcacctaggctggagtgcaatggcacgatcttggctcactgcaacctccacctcctgggttcaagtgattctcctgcctcaacctcctagggattacaacctcctagtagctgggattacaggcagccgccacaacgcccggctaatttttgtatttttagtagagacagggtttcaccatgttggtcaggctggtctcaaactcctgacctcgtgatccgcccgcctcggcctcccaaagtgctgggattacaggcatgagccaacgcgcctggcctaaaaaatttttcaaaacaatgcaagtttactacataaaatctggctttttttttttttttttttttttttaatgatgtggtcctgctctgtcattcaggctggagtgcagtggcacaatcactgcttattgcaggcttgacctcccaggttcaagctatcctcccctacctcaatctcccaagtggctgggaacataggtgtgtaccaccacacttggctaatttatttattttctgtacagcctggatccccctgtgttgcccaggctggtcttgaacttctgggctcaagctatccttcctcctcagcctcctaaaattccggaattacaggcgtgagccaccatgcccgacctagaagtatttgtttcaaggagcatatttaactacgccgtaaagaccaaatagttcagaagttagatgttacaattttagtctcttctcctacttcttcttttttttttttttttttttttttgagacagagtctcactctgtcacccaggctggagtgcagtggtgcaatcttggctcactgcaatctctgcctcctgggggggtcaagcaattctcctgcctcagcctcccgagcagctgggagtacgggcatctgccaccacgccggctaatttttgtatttttagtagagacggtgtttctccacgttggccaggctggtctggaactcctgagctcaagtgatttgccccgcctcggcctcccaaagtgctgggattacaggtgtgaaccgccgcgcctggctgttctttcacatattttctccatagttcagatcacaatgtatacaaatttttttcctgctagttttctttcacattactgcaatctatctcttttaaaaaaagtatatagtgcagctatttcagccaggcacggtggttcatgcctgtaatcccagcactttgggaggcagaggcggctgaccacttggggccaatgagtttgagaccagcctgggcaatgtggtgaaaccccatctctactaaaattacaaaaaaataattagccgggcgtgggggcccgcggctgtaatcccagctcctcaggaggctgaggcaggagaatctcttgaccgcaggaggcggaggttgccgtgagccgaaatagtgccactgcactccagcctgggcgacagagtgagtgaggctccgcctcaaaaaaaaaccaaaccaaaacaacaataacgaaaaacaacaaaaaaagtagattgtgcagctatgaaatgaaaagtacaaaactgttcagtttccaggcatttaaaattatttctggccaggcctggtggctcatgcctgtaatcccagcactttgggaggccgaggtgggcacatcacctgagatcaggagtttgagactagcctgaccaacatggagataccctgtctctaactaaaaaaaaaaaaaaaaattatttctactttacatttacattagtacaaccaaagtattgatgaattatcttacatactcaattttggatatatacataaacattcattctgtaaatttttattggatatgttaaaagcatcccatgaggccagcagtggctcacgcctgtaatcccagcattttgggaggccaaggcaggtggatcacctgaagtcaggagtttgagaccagcccggcctacatggtgaaaccctgtctctactaaaaatacaaaaaattagccgggcatggtggcaggtgcctgtagtcccagctacttgggaggctgaggcaggagaactgcttgacccctggaggcagaggttgcagtgagccgagattgcgccattgaactccagcctgggcagcagagtgagactttgtctcaaaaaaaaaaaaaaaaaaagcatcctatgaaaaaaatgaaattattacctttttattcatatattgaaataacttccaaaaaggcttatgccaattgaaactccttttaatacatcctcactgacagtaaacattacaatttatataatattcatcagtacgctaccattgctttaattcccatttttgtttttgctatggagactaaatattttgcatttatttaccaatcagctatatttattctttgtgaaatggacagggatttttttctttacaacaattttataatagtgcattagagatttgtcttagtaatctttttttttttgagatggagtctggccctgtcacccaggctggagtgcaatggtgcgatctcagctcactgcaacctccacctgctgggttcaaataattctcctgcctcagcctcccaagtagctgggattacaggcgcccaccaccatcatgcccagctaatttttgtatttttagtagagatggggtttcaccacattggccaggctggtctcgaactcctgaccttgtgatctgcccaccttggcctcccaaagtgttggaattacaggcgtgagccaacacacccggcccccgatttttcttagtaatctttggaaacacttcagaaatatttttaattagccctttcataatctcaggctataattttcctgtttatatgccataaaatgtgaacatgttacaccgtcaaataaaaaaagcaaggtgcagaagactgtgcataatataaatcagttatttaaaaaaaagaaaagaaaaaataagaaactatctgaaaggctaaaaaaagaatctgagttgttactttttcgatgtttgaagaatgtgaatatattatatactcaacattttaaaataaatgaactttaaaaagaatcctctcaaaatggtgtcagccacaatggcacaccagagagtgggaaggcaacacaatgaccattaactcagttttagctgccttccttgtatcataaaaacttctaatgttccattttccctgtggtaacttccaagatggcctccagtgattccccaccctctggtattcctatctgtatatggtccattcccacatagcatcagggttgctctgggtgaccaagagtatacaacagagtgaagttattttacctccaaggctattataaaaaacattgcaatgccttccttgttctcttttggatcactcattctgtaggaagccagctgacatgtcatgaggaccatatgacaaggaacagagggaggcctcctgccaatacccaagtgagtttgaaagccctagtcaagcctttcacatgatatggccccagtcaacatcttaactgcaacctcatgaaagaagctgagacagcaccactcagttaagtgaccccaaattcctgaccctcggaaaccatgagataacaaatagtggtggttttagttgataagtttgcagtaatatattatacagcaataggtaactaatacagattttagtacctggaagggaggtgctggtgtaatacctaaaatgtaggagtggctttgaaactgggcagtgggcagaagctaaaaaatcttcaaggagattgtcagtgcaagccttagtagaaaactggactctgagaaggctctggtgtagcttaaaatgaagtgaggaacatgttattagaaaattgagcaaggggttacgtagttacgtagtggcagaaagtttagtgactatcacctagtcaggtgaaagtagaaaatgtacctgagtcatctaattgagatttccagccagaatgctgaaagtgctgattggtttcttcttgctacttatagtaaaatctgaggggacagaaacaagctaagggaagaagtgttaaacaaaaaagagccaagagccaatacctgctggttttgaaaattcccagtctttccagatggcaaaagatgctaaaattaactgctcccaagcaaaggttatatccagggcactaaagaaaggtgcagaaatatgaaagatgagggtaaaaatcctttttactttttctttgagacagagtttcacccaggctggagtgtaacggcttgatctcagctcacggcaacctctgcctcccaggttcaagtgattctcctgcctcggcctcccgagtagctggagttacaggtgcaggccaccatgcccagcaaatttttttttttttttttttttttttttagtagagacggggtttcaccatgttggccaggctggtcttgaactcctgacctcaggtgatccaccagccttggattacaagtgtgagccactgcacccagtcagagggtaaaatcctttaaggctctgaaagatcaaaaatgatgcttcagagtacagtagtcccctttatctgtggttttactttccatggtttcagttacccacagtcaattgtggtccaaaaatattaaacggaaaattccagaaataaacaattcataggttttagtttatttatttatttatttaatgacagggtcttgctctgtccttcaggctggagtgcagtggcgtgatctcggttcactgcaacctctgctcctcggcctcaagcaatcctcctacctcagtgtattgagtagctgggattacaagtgcccaccaccacacccaactaacttttgtatttaagtagagatggggtttcactatgttggccaggctgttctcaaactcctgacctcaaatgatctatctgcctcagcctcccaaagtgctgggattagaggcgtgagccaccacactcagccaacaattcttaggttttaaattgcatgccattctggttagtgtgatgaaatctagtgcagtggctctgagttccattcaggacataaatcatcccattgaccagcatctctatgctgtgtatgctatgctcttgtggtgttataatatacattggttttgtccacagttcataactcccacagcccttgttacagtcttttgttataatgttcggtgttaggcctcagaggtaggcttctgaccttctgccatccttttacctgccccaaggcaggactctaatctttctgattgtgggttctaagaccctcccaagagagaatcctgccctatactctagcgggagagaatgcttaagtcatgaagcttccataaaaacccaagaagactgggttcagggagcttccagttagctgaacaacacttggaggttcttggaggttggcgcactcagggaagccatggaagctccatacctctttccacacaccttgccctgtgtgtctcttcatctgtatcttttgtaatatcctttataataaacctgtaaacgtgtttcctcaagttctgtgagctattgtggcaaattaatgaaatccaaagagggggttgtgagaaccccaacttgaagtcagtcagtcagaagttcagtatacccagacttgggagtggtgtctgggggtatggggggaagtctggaggaccgagaccctaacctgtaggatctgacactaaactgttccaggattcctgacactcagagactatgtgagttaatgtttaagctgttagttttgtggtaacctgttatgcagcaacagataacacattcccttccctgtttgcaaagcacacaatcccacccatcaaaaaacatggaaaaatggtactaaggtttcgatgtgtatgtttatacacacccatgcacacatccctcagacagcttttctgtcatttctgacattgtgcctctttctactgttttggattctatcaatccctggataggatcaaggaataaccccatcccattcacatccaaagttctaagccattagcccacatacatgaatacaggggaagatacaaatgagtctaagttataactagagcaggggtcagcaaacttttttctataaagtgtcaggtagtaaatattttaggctttgctgggtgtatatgggtctctggctctaacaatgttttgaaaatttaaacttagcctaaaagccacagtttgccaatgcttgccctaaagctaagaaagacttgtgtcttagtggcagtcttgccacacattgataattgttctaatttcaatctcataaccgggaaggaaagagtctaaaagggctaaccactgaaatggaatttactttatttatatgatgaatgcttttaaaagacaaaataactcacttatataacatttgtctgtttttttgagagagtctcgctccattgcccaggttggagcgcagcagggtgatctcggctaagcctccaccttccacctcctgggttcaagcgattctcctgcctcagcctcccgagtagctgggattacaggcacacaccaccatgcccagccagtttttctatttttagtagagacggggtttcaccatgttggccaggctggtctggaactcctggcctcaagtgatccgcctgctttggcctcccaaagtgttgagattacagttgtgagccaccataccagcatttgaaagaataaaaatcactatgggattaagtaaactcaattgtatttagaatttatcattcttttccatagatgttatcatgaataattacaattgcaaagtacatataactttgtatgttcctttcttattttgcattatagccaaataaaattgtgtactgcaatagctcctataatcactacttttgataactgaatactgtttgtagtaggtatatatttaataatttgactttcagtttggtttccaagttttgggttttttgtttgtttttgaggcagcatctcttgtcacctagtggtacaatcataactcactgcagacctcctggactcaagccctcccgccccatcctctcaagtagctggtcagactacaggtgtgcaccaccacgtcttaattttttttttttgagacgcagtttcactcgtttcccagactggatggagtgcaatggtgcaatctcagctcactgcaacctccacctcccaggttcaagtgattctcctgcctcagcctccccagtagctgggattacaggtgcccgccactacgcctggctaatttttgtatttttagtagagacgggttttcaccatcttggccaggctcgaactcttgaccacatatgatccacccacctctgcctcccaaagtgctgggattacaaacatgagccaccacgcccagctggtttgaatcctttgttaaagaaaattaaaaaataggttaggcatagtggcacacacttgcaatcccaacactttgggaggccagggcaggaggactgtttaagcccaggagttcgagaccagcctgggcaacatagcagaaccctgtctctaccaaaaaaaaaaaaaaaaaaaaaaaaaaaacctcacaaaaaacaatgctaaagaaagcgaatgagatataatgaataaaaacaaaaatagagaaaacaaaactaaagcaaatggggggttgcttcttggaaaaagtaaatcagaaacattgataaaaccaggacgaattaatgacaggaagaggaaatacactttaatattagaaatgagaaaggaagtgggattccgagtagttaaaaccatatcctatcccaaacagaactacttttgcttcaggaaaggaaggtttctaacaagaaagctgtaagtgcaaccaagtaaaaacttgggttagtaaagaaaatgattgtcttaatagatgttgtaaattataaaactaaataattctctttaaagattctaaaaaatagaaatagaaactttttttttttgagatagagcttcgcttgtttcccaggctggatgcaacctccgcctcccaggtacaagcgattcttctgtctcagcctcccaagtagctcggataacaggcatgcgccaccatgcctggctaacttttttgtatttagtagagagggggtttcaccgtgttaggctggtcacaaactcctgacctcaggtgatccacccgctttggcctcccaaagtgcagagattacaagcatgcgccaccacacctggccccaaaaatggaaatagaaattatttaagcaatatacttattacctttaagggcaaatcatttcttattaaagccaagaacaaagaagcccattaactccatcttaaatattgtttagaagttctggctgtagtgccgggcacggtggctcacgcctgtaatcccagcactttgggaggccgaggcaggtggatcatgaggtcaggagatcgagaccatcctggctaacatggtgaaaccccgtctcttctaaaaaaatataaaaaattagccgggcgtggtggcgggcgcctgtagtcccggctacttgggaggctgaggcaggagaatggcgtgaacccgggaggcagagtttgcagtgagccgagatcaggggccactgcactccagcctagctgacagagcgagactctgtctcaaaaaaaaaaaaagttctggtggtagcaataaggctaaaaatgaacacaagtggcaaaaaggcaaagattatacagtggtactaaataaaaattaaaaactaaaaataggccaggcatggtggctcactcctgtaatcccggcactttgggagaccaacgtgggcggatcacttgaggctaggagttcaagaccagcctggccaacacgatgaaacctcgtctctacgaaaagtacaaaaattagctgggcatggtggcacacgcccatagtaccagctgctaggaagaatcacttgaactcagggggtggacattgcagtgacctgggatcgcgccactatactccagcctgggtcacagagcgagactctgtctcaaaaaacaaaacaaacgtcccattttacttatggtggaaagacaatacagcaacaatacagcaacagcatttttttcacaaaacattttattactataattgatattttacttataatttttggcaacattaataaaataataaatttcacctgaaagaacaagcgagcaaaatagacaaggaaattcacaaagggcaataacaaaatagtaatcttgacatattcaatatatttgtaaacaaaacaaagtgacattgccttaaaaatatatagaggtatcaatagaaaaacagagaaagctcctgaaagaactcactatattaattttcatttggttgcaggcacagaaattgactcaagctagctcaattctaagacagaagcaaagcccttgatgctgatcgctttccagctttttcatgaaaacctaggaaatttaaatactttgaagaggaagaaaagagtggggagagagtaaagtgcctttaagaggaaaagtagaagtttttttttttttttaaagggagatctcattgtcagtggcattttaagagccttgaagctcaatgaaccaaaggaagtgtcaaacaattaagtgaggtagcaagccatgcaggcctaggggaagggcattctaagaaagacaacagcatgtgcaaagtctttggattgggaagaatgtgatttgcttaaggaatagcaaggccagtgtgtcaaaatagtgcgtcattggggaaaacagtggagaagcatgacagagaatgaaaaagagaggaaggaggtaggcaggggccagatcactggaatctacagttggcaattaatgaccatatgtactccttaagagcatgctttaatgaaactgcaaacaacagtgttgataataccaaccaatcactcaacatacaactaaaacacttcatatttttaccacagaaacagaatacgggaggtaagtatgaaaagtctgtagatctatttatacacagtgggagtatctacctgagacaagaaaaactggcacacacacacccacttgcacacacataccctttcttcaactaaagaaaggattcaggctgtaattttagcaaagtgtcttaacccaagcaacgtaactgaaaagacctagtatagtgttcaaggtgcaaatcaatcaaatgagtgtccggcaaataaatacaacagaatctatggatctagagtcagaaaattttctaaaatgtagataatatactcacaacttctttgttatctgtactgccttctactctaagagggatgctaagctcttaattatctcttcccggatttttgtgaaagcttaggaaatttaactagattgaggagggaagaaaggagtggggagagataaggtacctttaaaaagaaatcaaggaaaaagggagagatttctccagacctatgtctacagccaagatggcggattccttgactggtgaagacaggctgctgggcaccttggtcaggggtggaggaacaaaggatggcaccagaacacaagcagggagacaactccgggagtccacagaggcagccaagactgctgatgttcaggaaccaatactcaaaaggtactccagaatactgtgaaacagcccctggggagagcaagggaaaaagattcacccatagtacagattagataggatagatcagatgaaggacattaactctaagtcttaaaacttattgaattagagagacatttcttgcacactggtgtgtgtcaggtaagacccaaacagcattagtgtcaaaaaactgggaaactatacatttaacagaatagctgcaagctgtaatacattcatgtccaaagcaagacataaagttgcaagcttcacatgttcaattagggtaagatatatatgcacagaaaaatataaagccattatgggtttaaattcagtcagtcaccctgggctatttttgtccactgtacctactgttgttgggacagtcctcattccagcttaacagtgggaaaactaaatttagcccagtccaggaactggacagacaccacttgtttggcccttttcagttaaaactatgggtccagtacagttcaaattatagatattagggcttcttccccttgggaaacttgctttacagctgtggctgagaatatggccagttcattctccactaacggctagccagaagggagaggagagggaatgaatcaaattcacctttagatcacagaacaggaagtcagctagtaccaggcaccattctattaattttattgctatttcacctcaaaccaatgatacatgacggctgtttgatgtctgcaggggcccttcaccaaacaaaaccattttactttgaatggtttggcttccttggatgttttcaggtaggtaaagatactctgaagcagtgttccttttgacctggccccaagactagaatgaatgtgtgcctatccttcaactagaacaaagaaccactgctctccctcaactaacctccgccttcttggtctctgctcacgcagcagcttctctttcaattccacatcctggcttttcagaatcttttcaggttattttatgccagcacagcagaggcacttctgggaattcggcagcaagtgggccagggcataacaaagccattccagtctgactagagttaaccatgaaatgctgaatgcatggaaaaagctgtaaagaaaactaagtatttcaaaaattctatgaattctgtatatagaaaaaagagctttcaagcttaggagtaacatgaaataccaaaacaataaataggtgccaggggcagtgactcacacaacccagcacttggggaggctgaggcaggaggctcccctaaggtcaggagttcgagaccaccctgggcgacataacaagattccatcgctacaaaaaattaaaataaaaaactagctgggtgtggtggctgcgcctgtagtcctagctactctccaaaggctgaggcggaggaatgcttgagcctggaagttcaaggttgcagtgagctaggatcacgccactgcactccagcctgggtaacagtgagaccctgtctctaaagtaaaaaaaaaaaaaattaaaattaaaaaaataaattaatacctttctctctcacacacacacacacaaacaccttttatgtgttaagccagatacagttaacatgaaaaccagatgttttaaaataatacctcaaaattcagatcaaataatatatatcctgaatcttgtttaaaaagtcatatataatccactagtttcactatttttggtgctactgaataatgtatggtttgtattttttgttttatgaggttttttaatttggtttgaaatacttgctttagatttactgaaactagaattaatgggacttttttgaaattttgcttttagacctggggagtgatggttcagagtcagatgtgctcacagttatggatgctacatccactgatcctggctgaagaggttccagtgacacttgaatagtaacttttgtttcaggaggtaatccttctagttgcttaggcttcttaaacatttgatgacactgggtcttgtgctccattttctccttgaaagttaaaaactgtagccggcacttggaacactggtgtgcactctttccccagtggcccctataatgacacatgtatggtgttgctgttttgaaaattttgagacaaaagggacaaagcaaattctttgtgttttcatggcacgttctaaaatgtgtttctacatcagcaaagaccgacgatctataatggcaaacctggcacacatagggcatttcgccaggcttatgatggtccttcatgtgttgtaagaggacctgatctgtttcaaatgacaattcacagattttacagacagtagagggctcctgggcagtgtggacattttcgatgtgacactgtagctggaagggagtgggaaactgccggtggcagtgctggcaggtggtgtggttttcccagctgtcgttcctctgcttctcaaattccaaatgatgcttcacgtgattcataaacttaacattttttagaactttcacgcagctgaggcatttaaaggtggtgtgagtcttctgttccggctgcccttctcctttatgctgtccatagtaaaagtcactaagtaacacaatgggattttctttcttgggatcaaaggtcttgttttgacttgttagactcaaaatgtctgtttttgccaattcattttccctatcaagatttgtatttataggcttgaaatggatattgtcctttggaaaagctgctggaaaaggtgctccattctgaacatggcttaatgaggtatgaacattatttgagggtgtactttgctgagtattcattgtatgaaaggtatctgaagggaacgaagctgaagaatttccttctataattccatccctgagtttagcccttttgggatttatgctgtttacttcgaaagtggaaagttgctttgatacacgaggactttcatttatacctcctactgaaagtgctgtacttactggatgatgcaatgaatctgtgaatgtaatcaaaggagaaggtaattctgaagagttattaggcacaacttgtggtgaactatttctataatcaggtttagacaaaggctcaataataataggactatctgttgatctcgattcaagttgggaagctggcaggacggtcactgcttctgatgtaacggtctcatgacttttaggctgcaatttgcgagcagtatcttttctaaggtgatcatacttttttctccttgaccatgaacccggggtgactctgttcaaaatgtttgaaacgactggttttgaatttgaagtcaccccaacaaagattagctcagcatcttcatttacatgttccacaccaacaaagatgagctcagcatcttcgtcatctacttgtttggtttcttgtatgttcttctgtggttcaggctctttctcttcctcacatgattgttccattttctaatttttttattcctgaatggtggggccacaagtcccaatgcttcctttatataaactgccacctaagtacaaacatacatcagtaagtacaggaaaatgcattaccttatttaattttcctccaaaacattgtttttataaaccactattttacccacaaggacactgagactgaaagaggataaataacagcttaaaacctgtgataaaagatcaggttcctatgaatctagaatcataactttgctgtactgattgtgctctattccattttaaaaaaaaaacctaccagcagctaatcactaggcaaaattatatggaaaagacacacatttttatgagggcatcattgtgcagtgtttagaaacatgggctttggagttgaagagtaagctggaatccttagtctgccacacaccagatgcttcctctttagcaagttttttacttttaaatgtattttgctatcttaaaggcaaaaattcttatttcttagacttacagtaatagctggttttttaaaagcaccacctattcaatggcagcttgatttgtagtggaattggaagaaaattacaataaatgaaaatatctcaattgattcatatatagtaatctcataaacattaatatagaaaagaggtattaaatttatagagttagagtacctacacataaccaacaaacagcatagcacaatgtcaattgccaggcagataatctcatcccaactcatggccttaattataatccattcagtaatgcctcctaaattttcccctccagttctgacttacccactgaacttaaacacaacagtgcttcctcctcaatctcttctccacatagcaagcagattgattgtgttaaacaaagtcagactgtatcattgttcagctcaaaaccctccaacggctttctgattaactgagagtaaaagaccaagtattaccaatgcctagaagactacactaccaaccccacatactgctcctgcagttatctcatactactctccactatccacttcactgtagtcacactaacctccttgctatttattttaattttttaaattaaattttatttttttgagatggagtcccgctctatcacccaggtatatatttcagctcactgcaacctccaccttccaggttcaagtgattcttgtgcctcagcctcctgagaagctgggactacaggcatgcaccaccacacccagctaatttttgtattttcagtagagatcgggtttcaccatgttgaccaggctggtcttgaattccttatctcaggtgatccacgtgccttggcctcccaaagtgctaggattacaggggtgaggaactgcacctggccctccctgctatttcttgaacatactaagctcttttccttgctcaaagcccttgttccttccaatatgaatgatcatttgggtatccgcatggctagctcctcactgcccttagggctctattccaagtatccctctcggtgaggttcttaaatattccaaccaacctctaacccacattcctaatctcttttcccttttctttcatccccaaagccctatcaccatttaacatattacgatcctatttatcttgattattttctattgtccatccagtggaacataaaactcaaaagggcaggtattctatcttttgttgactgttgtatgcccagcacaaagaacagtgtctggcacaggacaggtgctcaacaaatacagaatttgttaaatgaatcaataaatatcgactctccttcataagatcctttatttttaaagaagattatgctccattaattccacattttctatgaatttactctgagaactttatccattggaaattccgtaggccaataaaggacttaaagctagctttttacaaatatttgaccacaaccaatagtttaaaaaaaaaaaagtgatatggagtccaattacacaagcacatacacataaataataactacctttactacacaggctgcattctaaaattttctatttcatttttcttgtctttttcttttttttttttttttgagacggagtctagctctgtcgcccaggctggaatacagtggcgcaatctcagctcacggcaacctctgcctcccgggttcaagcaagtctcctgactcagcctccagggtagctgggattacaggcacatgccaccacacccagctaatttttgtattttttagtagagacggagtttcactgtgttggccaggctggtcttgaactcctgaccttgtgattcaccagcctcggcctcccaaagtgctgggattacaagcatgagccatggattacaagcctgagctgtgcccagcctcatttttcttaaactaaccacagacccacaaaatcagttaagcctcatcactaggtcactactagttgtttcaaaaactggtctaatgctagcaaaatgtacgcactagaaaccaaggttcataactcaccaatttctaaaaacatatcaagattcactgtatccccatgtggacccttcaaatcagcataatccaaagcataaaaattaaattgacatctaataaatgccatgcacatttgttttaattttaattaggatatcagtatctaattttggaacatatagacaatatttattcctataaatatgtgtatcaccttggaagtgaatttaaaaaggaatacaatattaagtaagcattgtcaactatatacaaactggtgtatcatgaatagtgatttacaacttaattagtagatatataatgccagaaaaaatataaggcagatatgaatacactgctctctggagtcaactaaaattggtttagtctgtctatatacaacttcaatcgcctaactccaggatgatgtcacctagcccagtgtttcctaagcattactgacatttgggactagataattctttgctgggggctgtcgagagcactgtaggatgtttagcagcatctgtgatctctacccactagaaaccagcagtagtcccccagggtggcaactaaaaatggctccaggaattaccaaatgtcctgtgggaaaactcctgcccaaatccaatcttctcaggatcacttccacatttccagtaactaccttctacataattctaaatgtattttctaacatcctctctaaagaaaatatctggccgggcacggtggctcatgcctgtaatctcagcactttgggaggccaaggcagttggatcacaaggttaggaattggagaccagcctggccaacatagtgaaaccctgtctctactaaaaatacaaaaaattagctgggcctggtggtggacacctgtaatcccagctacttgggaggctgaggcaggagaatcgcttgaatccaggaggcggaggttgcagtaagccaagaccacgtcactgcactccagcccgggtgacagtgcgagactgcatctcaaaaaaaaaaaagaaaatattctaattcacaatcattaatattctccaatatcctaaaaaatcagactataatctgacaacatggccattagatttatctgaagattaattagtttattattgttattattttttctttttcaagacggagtcttgctttgtcacccaggctgaagtgcagtggcatgatctcggctcactgcaacctctgcttcccaggttcaagttattctcctgcctcagcctcccgtgtagctgggattacaggtgcgccaccacgcccagctaatttttgtatttttagtagagacggggtttcaccatgatggccaggatggtcttcatctcctgacctcatggtctgcctgccttggcctcccaaagtgctgggattacaggcgtaagccaccatgcccggccaatctgaagattaatttttaaagcccccagaagtttatgatttactaaagttatatggagggtttgtagacagagttagcactaagatgcctaattcctgaattctggttttgtgctctttctgctaaaactgacttagtgcacacttatttctgatgatattgctgttaactgcttagtctttaagaattaaagtgtctcattggattcattttttcactctctattttgtaaacctgttcaaacctcctctacctcccagaaaatgtcaaagtaccttataagccattttaaataacttttagagcatcactcattctacctctcatgtccattcctattaatggcccccagcccaggccgcaacttctaggtttaggtccactggttacttcatttttgtacacttgtactagaccctaaattgttctgtctcttttctctgtccttcaaattatataacacaacaccacaagatggatcttaaaacacaactgtaattatatcactcttctatccctaagcgttaaatgattcctccaattctagagaatattttaggtatacataatttgtgttatgctatgggctgaactgtgttccccccacccccaaatttgtatactgaagctataacccccaatgtgatggtatatagagatggtggctttgggtaataatcaggttaagatgtattcatgaggatagggccctcatgatgtgattggcgcccttataagaggagatatcacagaccttgcttcctctttctgtcatgtgagaacacagcaagaaggctgtcatccaccagccaggaagagagccttcactaaggaaccaaatcgtccagcatcttgatcttgaacttcccagcctaaaaatgtgagaaatgaattcctgttattaataaaccatcaaacaagtaaagaagaaaaacttaaactgggttctaatgacactgctggacttcctaaccagttgctcttggttagatttttggctgttgtccatactgattaaccctccatccaaccatcaatcaaggtgaaaaagaggaatagagcaaggatcaggaacaaagctaataagttaatgaacaagttcattaagaacaagagtagcattagaccatgagagttttcttctcctctagatgtccagagacccttctctacaaatgtccaccaatggatgaatgaatgcttattttccaatttgccagaatcttgagatactggggtagggaggttagacatgcaaagatatatcagatctaacaggtttgtcctcaaaaatcaattctcacctcccatgatgggagaagccaataggagggcttcaattccaaagaaagctgagagatcagtggatgataacccaccttccagattatttctatgcattcaaacaatggcccttctactagatcattgttttttgttttttttgagatggagtcttgctctgtcacccaggctggaatgcagtggcgcaatctcggcccactgcaatctctgcctcccgggttcaagcagttttcctgcctgaggagctgggattacaggtgcgtgccaccacgcctggctaatttttgtatttttagtagagatggggtttcaccatgttggccaggctggtctcaaactcctgaccttgtgatctgcctgcgtcggcctcccaaagtgctgggattacaggcgtgagccaccgtgcccagcctctagtaaaccattgttattaccacacacgagtttttaaccacacacatactcttctgaggaaaggcttccccaaactattggtccttatgatgagatctggccatatatatttttcttctgaaccccaggattgtggggctgtcacatttcctctaacagtacaccttaggagctcccagacttgaagaaaattggctgtttcccacatttgaacattttccactttttccctcagtctacctttttgaattgatttctgactacttctagataacctttttccattaatgaatattgagtgcttattgtgtgccaggcactgctttaggcacttgagagaaatcggtaaacattaacagacagaaatgaacaacaaaaacaaactatttcaacagaaggaactaacaaacagtccagtggaggaagaaagatagtaagtataataaaaatgcaaattctctggtgaactggaagatgacgttatagaattaggaaaaaaataatagagcaggcttagaagttgaggaggtataagagaattgtaattttacgtagtgtagtcagagtaagtctcatggagaaggtaaatttggacatacacttgaaggggataaaaggtcagagaggtagcaagagtggaaatagtagtaaggatctgtaaattcttcatttttctctcagtttagtctgtggcaactgtcatgtcttttgataaggaacgaccttggtttaatagttactcccctcctagactctcaggctagattttttttttttttaattgagacggagtcttgctcttgttgcccaggctggagtgcagtggcacagtcttgtgcacagtcttggctcactgcaaactctgcctcccaggttcaattgattctcttgcctcagcctaccaagtagctgggattacaggcgcccaccaccatgcctggcgaatttttgtatttttagtagagatggagtttcaccatgttggccaggctggtctcgaacccctgacctcaggttatccacccacctcggcctcccaaaatgctgagattacaggcgtgagccactgcgcctggccttttttttttttttttttttaagatggagtctcgctgtgtcacccaggatggagtgcagtggcacaatctcaactcactgcaacttctcctgagatgcttgtgcctcagcctcctgagcagctgggactataggtgtgcgccaccatgcctggttaattttttgtatttttattagagatggggtttccccatgttgtccacactggtctcgaactcctgacctcaagtgatccacccaccttggcctccaaaagtgccgggattacaggcgtgagccactgcacctggcctctcaggctagtttcaaccctattttacactcctctaccatcctcagcttacttttgaaaaagtatttattaaaaaatatttatgaaaaagttatttttgttttatttagttgccctgggatggaatacaaatgtttgctgtagttttaaggatcctataaaactcccatttactgcaaggatctctgtttaatgggcattcaattctaagatagcaaacgtgtagagttatttgtgggggtgggggacaagtttgagaaagaagcagtggggtgaagaaagtgataggcaagggaagatggtggggataggtaccataggagtcctggtggcctaaaatctaatcacagaagttactcaagtgggactgatgcctgaaaaaaatttgtgtgtggctataacagtgagtgggatctactcttttttttttttttttgagatgggagtctcgctctgtcacccaggctggagtgcagtgccgtgatctcggctcactgcaacctccacctcctgggttcaagcaattctcctgtcttggcctcccaagtagctgggactacaggcacatgctaccacgcccatctaatttttgtatttttagtagcgacggggtttgatcatattggtcatgctgctctcaaactcctaacctcaggtgatagacccgccttaggctcccaaagtactggaattacaggcgtgaggcaccgtgcccagcctgggatctactcttaagcaacagagaaaatcagtcatttttccccttttccttcccttcctcctatgagcagaatcttggtctccatctttaaaaaaaaaaaaaaaaaaaaaaaaaggccaggcacagtggctcacacctgtaatcccagcactttgggaggccgaggtaggcagataacctgaggtcaggagttcgagaccagcctgaccaacatggtgaaactccatctctactaaaaacacaaaaatttgccgggagtggtggtgggcgcctgtaatcccagctacttggtaggctgaggcaagagaatcaattgaacccgggaggcggaggttacaaaggagatttgacagggtggcagttcaaactaaaagtggtctgatagttcagagtcaagtttcttcactaaagctgagtttttaaagggcttgaagaatgatgtaaagaggggttgtggaggaccacaaaaaaagacaactaaaaaaaggcataacaaagtcaacttattaaatgcccagcaacagggtgaagttaaggggaatggtggaataaagacctacaaatagctgctgcttcataaaagcaaagagaacactagcaaaaactacaaaaatcacgtttttcagatcctggaaattaacgaaagcttgtaaaactcaaaagattttattacaaaatggcttggcggttcctcaaaatgttaaacatagacttatgatcccacaaatctaagtatacactcaaagaaataaaggtactcaagtacatgtatacatgtttatagcaacaactcataataatcaaaaggtggaaacaacctaaatgtccatcaatggatgaatggataaacaaaccatggtatatacatacaacagaatgtttattcagccataaaagaaacgacatactgatacatgctacaacagggtaaaccctgaaaatataccatgtaaaagaagtcagtgacaaaagctcatatattgtatgatttcatttacaggaaatatcagaaatagataaatccatagatattaaacaaagatttgtggttgccagaagataggaaagggaaaatggtgagaaactgcttaatgggtaaaggggttttactttggaatgatggaaatgtatcagaactagatagaggcagcacacgtacaatattacaaatgcactaaatatcactaaactgtttattttaaaatgactgatgttatgtgactttcacctcaatgaattattttttaaaaataaagagggtatattactaccaaccacacagaaaaaaagagaattataaaggaatactatgaaaaattatctgtcaacaaattagataacctagatgaaacaaattcctagaaagacaggaactaatgaactgactcaagaacaaacagaaaatatgaatggatccaaaacaagcaatagaattagtaatcaaaaaacttccccaaataaaagcccaaaatcagatagctatgctagtaaattcttaacgtttttaaaagaattaacaccaatccttcattaactcttccaaaaattagaagaggagagaaaactttgcacatctttctatgaggctagttattactcttacaccaaaatcaaaccaagaaatcatatataaaaaaagaaaactacaggccaatatcctttttttttttttttttttttttttttttggagacggggtctcgctctgtcgcccaggctggagtgcagtggcgtgatctcggctcactacaagctccgcctcccaggttcaggccattctcctgcctcagcctcccgagtagctgggactacaggagcccgccatcacgcccagctaatttttttgtattttttagtggagacggggtttcactgttttagccaggatggtctcaatctcctgacctcgtgatctgctcgccttggcctcccaaagtgctgggattacaggcgtgagccactgtgcccagccaatatcccttacagaggcaaaaatcctcaacaaaatgttagcaaacaaaatctaacaacatatataacgattacataccatgaccaagtgggatttatttaaaaaatacaaggatggttcattctatgaaaatcaaccaacaataattttatttttattatttttaattttaattttttttttgagtcggaatttcattcttgttgcccaggctggagtgaaatggcacgatcttggctgaccacaacctccgcctcccgggttcaagcaattctcctgcctctgcctcccaagtaggtgggattacaggcatgcgtcaccacgcccagctaatttgtttgtatttttagtagagacatggtttctccatgctggtcaggctggtctcgaactcccgacctcaggtgatccgcctgccttggcctcccaaagtgctgggattacaggcgtgagccaccatgcccagcctataccattttaataaaggacaaaaactacacctgcctgcagaaaaaacacttgacaaaagctaacatccttttatgatttgaaacaacaaaacgattaggaatagaaggaaactttctccaccagacaaaggcatctgtatgagactcacagctattatagtatcatacttaatggtgacactgaaagtacccctgcccctaagatcaggaacaagacagatatccactttaaccacttcaactcaacaccgtactagaggttctatagccaaggtaattaggcaagaaaaggaagcaaaaagcattcagattggaaagcaagaagtaaaaccataatggagatgacaaatacaaataactcaattttttaaaaggccaaagaacttgaatagacatttctccaaagatgatacacaaaagaccaagtaaatatattcagtgtcattaatcataaaagcaatgcacattaaaaccaccttgagataccacctcacacctagtaggatgactactattaaaaaacaaacattgttggaaagaaattagaatcctcatgcacagtcactggattgtaaaatggtataactactatggaaaacagtacagaaatgcctcataaaattaaaaacagaactactatatgttctagcaatcttacttctgggtatatatctaaaataattgaaagcagggtctcgaagagatactggcacacccatgttcacagaaggactattaaaatagccaaggggtagaagcaacccaaatgtctacccaaaaatgaataaacaaaatattatatatatatatgcacacacacacaatagaatattattcaacctcaaaaaggaagaaaatctgtcacatgctacatgtttgaaccttgaggatattatgccaaataaaataaaccagtcacaaaaagacaaatacttttgtatttgtataattccacctatatgaggtaactaaaatagtcaaattcatagaaacagaaagtagaggccggaagcagtggctcacacctgtaatcccaggactttgggaggctgaggtgggcagatcatctgaggtcaggagttcgagatcagcttggccaacatggcaaaaccctgtctctactaaaaaaaatacaaaaattagccagatgtggtggcaggcacctataaacccagctacttgggaggctgaggcaggagaattgcttgaacccaggaggcggaggttgcagtgagctaagatcacgccactgcactccagcctaggcgacaagagagaaactctgtttcaaaaaaaattagctgggcgtagtggtggcacacacctgtagtcccagctactcgggaagctgaggcagaagaatcccctgaatctgggaggcagaagttgcagtgagtggagatcgcaccactgcactccagcctgggcaacacaccaagactccgtctcaaaaaaaaaaaaaacaaaaaacaaaaaacaaaaaaccaaaaaaacaaaaaacagaaggtagagtaatggttaccaagggctaggggcagaggaaaagggtgagtctgttgtttaatgggcattgtttcagttctgcaagatgaaaaagttctagagatctgtttcacatcaatgcttgaaactactgaactattaatttagaaatggttaaggtggtaaattatatgcgtttttaccacaataaaacaattcattttaaaaacaggccccaatcggcatggtggctcacgtctataatcccagcactctgggaggccaaggtgggagaatcacttacagtcaggagtttgagaccagcctggccaacatagcaaaaccctgtctctactaaaaatacaaaaattagccggcatggtggcacgcgcctgtaatcgcagctactcgagaggctgaggcaggaagaatcacttgaatccaggaggcagaggttacagtgagccgagatcatgccaccacactccagcctgggcgacagagtgagactctgttaaaaaaataaaataaaataaaaaataaaaaataagctagacacagtggctcacgcctgtaatcccaacactttggaaggctgagatgggaggatcgcttgagcccaagagttgaagatcagtccaagcaatgtagtgagaccccttctctacaaaaaatttaaaaacacaggcacagtggctcatacctgtaatcccagtattttgggaggctgaggcaggaggacttagtcagctcaggaattccagaccagcttgtacaacatagtgagaccctacctctacaaaaaattaaaaaattaaccgggcgtggtagagtgtgcccgtgatcacatcactgcactacaaccttggtgccagagcaagactgtctcaagaaaaaaaaaaaatttaaatttagctgggcatcatggcacacgcctgtagtcccagctactcaggggtggaatgaggcagggtggcagctgagatgggaggatcactggagcctgggaggtcgatgttgcagtgggccataattgtgtcactgtactgcagcctgggcaacagagcgagaccctgtctcaaaaacaaacaataaaaaatgggcgaaggatttgaacacttctccaaagatacacaaatggccaagcagcacatgaaatgctgctcaatatagtcattaaggaaatgcaaatcaaaatcacaatgagctattacttcacatccactaggttagttataagcaaaaacaatctcaagcgttgcagaggatgtgcagctatctgaaccctcaaatactgctggtgataatataaacttgtactttggaaaagtttggcaattgctcaaaatttaaatatggcgttaccatatgacccaacaatatcactcctaggtatatacccaagagaattgaaaatataacacatatataagctagctggaatatagccataatgctgctacaaagtgcaaacaaccgaatgtaaattaattgataaatgaataaacgaactgtggtatatccgtacaatgaaatactattcagccataaaaaaactaagtacaaacaagcatacaatacggtgtaccttgaaaatacactaagtgaataacaccagacacaaaaggccgcatattttattattttacttatacaaaatgtccagaataaggcaaattcatacagacagaaataaagtagcagctgccatgggctcgatgaagaagaatgaaaggaatatagcaggtttgaaaaatggcccccaaaatatcaggtcctaatcccttaagcctgtaaatgataccttatttggaaaaaggatctttgcagatgggaaaattatcctggactatacaggtgggccctaaatgccaccacaaatgtccttgtaagagaagcagagggagatttcacacatactctaggaaaaggtgatgtgaagacagaagcaaagattagagtgacatggtcacaagccaaagaacgtcacatccacaaactagaagatgcaaagaatggattctccgctagagtttcccaggggaggacagccctgccaacatcttgatttaggtcttgtgaaacttattttagacttctgacctcccgaactaagggagaataaatttttgttgttttatgccaccaagtttgtgataatttgttatagcagctatggaaaagtaatatagggagtgactgctaatggatacaaggtttctttagagttgatgaaatgtcttggaattagatattgctgatggttgtacaattttgtaagtatataatactaaaaaccattcaatttcacaccgcaaagggtgaattttatggcatatgaactatatttcaaagaaaaacaaatgcctagtaacaggctggtataacccgccatctcccaacaactgctgctaaattttcaaagcaccattaagcagactcaattcgtagcaaggataatggaacaatgcaagctcatctagcgaacaaaaagaattaagctagtatcaggtggtcaatttacaaactgtagtgggagtcatacattcccaaggatggaacagttatatctccttgcagagtgaactcttctccgataccaaggacttggaagaccaaataaattatacgtaggattaccaaatatgctggtatgaccaagacagttatagtttaaacttctatctctgtggaattatggatagtgccactcttcaatctttaataagtccttcagtttagatgataaattacatagtcaacctagttataaggaatctagaggttgtgaaaagctgtgagagcatattctatgcagaccacataggtcctatcatgactccctatgtaacttgggtctctgcgactgggaagctcccagggaaaaaaccccagttaagacttctgcagagcattcacattttgtttcaaacttatacaacactaatgctaaagctcaactctcagaattgtattattcagtattatccaaataactgattaatttacacactgaagggaaagaacaaggaatggacctatacacacttgtagtttacaagtataagaagctaacaaagaataagattaaaataacttgtgccaggccgggcatggtggctcacgcctgtaatcccagcactttgggaggctgaggcaggtggctcacgaggccaggagtttcagaccagcctgaacaacatggtgaaaccccatctctactaaaaatacaaaaacttagctgagcgtggtggcacacgcctgtaatcccagctactcaggaggcaggagaattgcttgaacccgggaggcagaggttgcagtgagctgagattgtgccactgcactccggcctggacaacacagcaagactccgtctgaaaaaaaaaaaaaaaaaaaaacaaacaacttgtgcccacattaactaggtgttaaaagccaaaaggtgaaagtcactattctcttttcacatatcaaattgaccctaaggtaatattgctgcattagaactgagctggtgggagggatgttaagaaattagggagaaattgttaatctacagaaagaccatcatataaggttctgtgtgtagccaaacatacacatttgatgttctgatgtttgctattttagtggaactatagctataaaatgtattcaatcagtagaattaaaacatatcccagtccacaaaaaactaagagagaaattatacaggaatgatcaagaatctgcacagttctcataatctcattactagagagaaaaggagaaagggaagcatcaaggtagtatttgagacgaatttaagaagaccactcattcaataaaagtttggtgggccaacaaggtgccatgtattggtctggtgatatagcagtgatccaaagtctttcacttcagggagctgacattccagaaggagtagtcagaaaataatttttttaacaaaagtaacatggttatataaacactagggagaaaaataaagtaggaaatggaggcaggttgatactcacataacatgaatatggctgtctggggaagaatactccaacaaagggaacagcaaacacaaagcctctgagactggagcacttaacacatgcaaggactgatcaataggctaacacaggtggaccaatgaaaagagtgacaagttagaaatgagataaaaaatgagctgtttgtggcaaaggaaagccaagatcatgtaggccattctaaattcttcagctttggccaggtgtggtggctcacatctgtaatcccaacactttgggaggccgaggcgggtggatcacctgaggtcagaagttcgagaccggcctggccaacatggtgaaaccccatctctactaaaaatacaaaacgtagccaagtgtgctggcatgtgcctgtagtcccagctactcgggaggctgaggcaggagaattgcttgaacccagaagacagaggctgcggtgtgctgagatcatgccactgcactccagcctgggtggcagagcaagactccatctcaaaaaaataaataaaaataaaaataaaaataaaataataataatacaaaaattagctgggtgtggtggcgggcacctgtaatcccagctacttgggaggctgaggaggagaatcacttgaacccaggaagcagaggttgcagtgagccgagactgcgccattgcactccagcctgggtgacagagcgaaactccatctcaaaaaataagtacataaatagacaaaaaataaaaacaaattcttcagcttttaccctgagtgtgatgagagattactggaaggctctgagtgagaagtaatatgatctcactcatttcattaggattgctgtggttactgtgtggagaatagactttagagagtaatagtggaagcagaagacaagaagctactgaaatattataaacaaaagatgatggtagtatcagacaggatggagaaatagagatactaagaagtcggactctagataaaaatctagaaggcccaattcattgatggattgggtttgggatgtgaaggagaggaggaggacacacaagaggtaatgctgagcaggtaaatctatgagatcagagcccaaggaaagttccgaggtaggtacttaaattttgaagtcttcagtatgtagcattatttaaaacacaagactggatgagatcactcagggaaaagaggtctgagatctaagctctggggcattccattgattagaggtcatggagatgagaaggagctggtaaaggaaattaaaaaaaaaacaattattcacagccattcaggtgggaggagaattgagaaagagaagcatcccagaatccaatggggaggagaaaaggaactgtaatatatgctgccaatagatcaaataaaatcacgaaaatcaactaaaactgaccaatggattaagcaaagtggaattcattggtgaccttgacagcagtgggtttaaggaagaacgagaacaggagatagcaaatacggacaactctggagaaattttcctgtaaggacaagcaaatacaaattaaaacaagcagatgggagatgtggcatcaaaaacgagatctttaaggtgaggtgatggtacaatcagtatgtttgctatattaatgatctggagagatagaaaacttaaccctagacaaagagaagtcttgctagaataatatccttaaataaacaagtgcacatgtagaggttctggccttagcaagaagtcaaattattcacccagagtaacaggacaatgctttgagatcctatggaaaagggttaaatggtggataaatggttgcggtggccatcctccaagatggccctaaatgaatcccacttcctggaattcacatagttgtagccctctcccactaacagggttggcctgtgggatcaagcacatacagcaggaagtgatggtatgccacttcagaaattaggtcataaagactctgcccttcatcttgggtacaaggtctcttgaatcatttgctctgaagtaagccagctgctgtgacatgaacagccccatggagaggcccacagagcaaggaactgaggcctcttgccaacagcccagtgagtgagcttagaggcagatgatccaaaccaagtcaattccgcagagactgacaatccagccaaaggtttcactgaaacctcatgagtgaccttgagccagaaacagccagctaagccactcttggattccagaccttcaaaaactatgaggtaataaatttttttttaaactactaagttttgagacaatttgttacacggcaatagataactaatacaatgggtctcactgagctgtaatcacaaattgctgggcacacaattcactataatctcacctactggcatgcaatgacttcagatgacctcccctgtcctgctgcatgcagttacctcatgaaatacagtcgctgagaaagagggtaggataaaaggagtcagctttatataacttaacatccctgatgctcttttttttttttcaagagatgtggtaaaagaatgccactaccaccctctcctttctcaacaaagcaatttagagggttcccgaatgacctacatcaacaattggcctgaactaatcaaacgcatcattcagattccctcagtaaaatattgaataccaaacagctatgcttcagcaaaggaaagggcaagggagcgaaactgaaggacgaaaatacaactttggtcctcatcagggagacttctcttttcttacctcaggtttattacaacgcaacttttaagaacttgagctattccaggcagaaggtcacatccttgaggtaaccagagagaagcattagttacttacatgtcacaagaatattttcgatcccactgcctgacattgccatttaggtgtttatcaatcatctcacacttaaccagataagtgaactgaactcctttcccccagatctgttcctccaatctaccctaccttagcaaaggaaaacgtcccacccgccaactgcccaaatcaaaagcctgcaaatcacccgaggtcctggctctcacgggagggactccattagggtcccaggggctgcattaagagtcccgacagcgacgcagtaaatgagacaagacgctgcggtaggggagagagacccatacattcaaatgccttaaggggtctgggcctacaggtctccagaactggggagggcctggggttacaaagcagttttcagatttttaaatacattgagcgccaaaagagaccccgcgggggcgatgggggaggggagcgcactgggagccaggaaaggccccttctccaggaggcccgggcccagcccgggggtgggggcgtctgcgtgagggagtggaggctgatgtaaaagtggcgcccgctgagattagggaagggggtgtgcgtgaggggatcgtgggacctggttctgccctgcactcccccacagaaagcggctgtattgcaaaggccgctccggcagcgcacggccaagcgcggtgtcgcgacccgcagggctgcggctcgccatgaaatccctcaagtctcccctcagggaacgctgaagccgcgccacgcccccgtccttaccagtccggatcagctgctgttcgcgagctgccggccacgcaccagccccggaggcgctcccggggcacagccggcggcgactacgcctcctcaggcccccggcgccgccgacgcgcacgcctccacacgcgcgcgtccagtggagacctgcgattggctgccaggtgccggcgcgagatcggcgcggctccgagctaggagcatgcgcgcgctctgacgcccctggtggcgacggctggacgcggggttaaattgagaaggaggagggcagcagcaatacccctgaggccttgaaaggatcttgggttccggatcacggttccaggcagtcagggttccagagctgagggggtatccaagcagtcagggttccagagctgaggagcatccaggcagtcagggttccagagctgaggggcacccaggcagtcagggttccagagctgtcgcagccagggcttggggtggggggtaggcttccagtccatcaggggatggtttgcccaccagaaggccagctgttataattctcaggtgtggtccctttgttgactatccatgcttaagggattgtgaggaaacaactgaacctaacatctgtcctcttctagttacatctggggccagttgaatccagcctgccacctgtttttgtacagctggcagcaagctaagaaccgatttcacgtttttttaatggctaaaaagagaatattttgtggcatgtgaaaattatatgaaattcaaaattcagtgtccataaataaagttttattggaacaacaaacatgcccattcctttcggtattatttatgcctgttttcctgcttcaacagcaaagttgattaattgccagagaccatgtatgaaaagcttaaaatatttactgtctggccctttacagaaagtttgcccactcagtttacttgcagctttgattttttttttgaattgaccaattctgccaaaagtctattttagcaatctttttggggggcgggtaaatcgcttttggtttaattaatctataatgttattttcttatctattttatctatttcttccattctgttattttcttccttcgtgacttcataggcttgttctgttacttctcattacaacttttggagaaaaatgcctacctcgtttgcttgtaaacttttttgtttctcttgtatttaatgctataaatttacctttaagtaccagtttaactgtgtctcaccagtccgcttggtaatatgttcattatccttcaattagatatgtcctaattttgctagttgttagaaatgcttgttccctggtgccgcaaagaaatagcacttgaacataaatttaattttctcagcaaggccattttcactttctgcagaaagggtacactcgccagcagttttgccacgagagtaccccaaacaaaggatacagggttatttataacctgacgcatccaccctactgctgtgtccggtttccattggctggaacaggacctcacattctgtgtttgtcccgattggctaacaacttagaactttctaaaagaggcaaaggcagaggagaacaaaggaaggaggatgtaacttgtagaatgctgagaaaggtaaaaacacctccaaataggaagaggaacaggctatgacctaatgcttgcttggaccagtataagcatgcaagggcaaatatttaggctaaattgtgggagctaagaacacaaagtatattaatttctttattacggctagcagatatctaagaatgttagcacaggtctttgaataaattttacttctaagagaagttactatttattcgtaattagacagggaggaaagtctttgaagaggaacctctactttattttttacatagtgattctttctaacacaagggttatatagtatatgttatttatttttgaaatctatgagatttttaaaagattttttaattgtattataatcaaatcacatggcctaaatattactcacccttgcatttgaagatttctgttcagtgaagtgtaccatagtcaaaatgaagagatcatagatgtaaagaagatatttgcagtatctaaaatgtatatatgaggctgatatgtaaagatatttgcattatctaaaatgtatatatgaggctgatatgtaaagaagatatttgcaatatctaaaatgtacgtaagaggcctggcacggtggctcacacctgtaatcccagcatttttggagaccaaggcaggcagatcacttgaggtcaggagttcaagaccagcctggccaacatggtgaaaccccatttttgtacaaaaaatacaaaaattagctgggtgtggtggcacgcgcctgtagtcctagctactcgggaggctgaggcatgagaactgtttgaacctgggaggcagaggttgcagtgagctgagattgcaccactgtactccagccttgggcaacagagcgagactccgtctcaaaaaataataacatgaaaaataaatctatgagaaatgatcttcttttggcttcataataattccaatgtccatcagtaaattagtatcaactaagctccaggctttattcaaatgtcactagtttttcccatcatcctttttgttccagattcccacccaggatactgaattgtacttggtcattttgtgttcttagccttctgtggtctgtgacagtttcttaaacttttcttgcttttcatgaccttgacaattttaagaagtaaaggtcaggtatttttcagagtgtctctcaatttaggtttgatgtttttctcatggttacactggggttatggtttttagaagactatcacagacatgatgtgtctttctcataatttctcatcagcgatccatgctatcaataagacttcctactggcttctccgctgtaaattacttcccccccctttcataccttattctaaatcttgcctacatgcaggaaggccgtgaggtctcattgaaggaaaattatctacacaagttactttgcaattcttctttaaggaagatttgtctcttcttcctttagttttaaattaatcaaaaatagctttttagttttaaattaatcaaaaataaaataaaaaatttagtacctcagtcatacttgccacatttcaacagatcaatagtcacctgtagcatattggacagagcagaagtagagcattttcatcattgcagaaagatctacggacagcactgacttagatcattagtcaacctttcttcttcccaaatatatgcatttagaaatataaattcccatgaaatgctttagttccatcccataaattttgtggctgttttcaatatctttcagttcaacattttccttttttcactgcaatttcttagaggagctatgggttattcagaatgaggaccaggactggggtgagataagcaaggaggctgaggcacattaaggagagacccacgcccagcttcaggtatggcatattgtcaccttaggttccctgcttgcctcaccctagtcccagccctgtttagaaatgtattgcctaatttaggaactttgggttttttttcagtgatctttctgttactgatttgtaagttgattcccgtgtactcagtgggtaactacaaagagccccacagctaacatcacaattaaagtaaactattctacctgagtttgagaccaagaaaagcacacccatgaaagccacttcaattcgcaaagcatttggaatagccaaggcaattttgaacaccaaagttggagaaatgaaactaccacatggaggattatgcaaagctacaataattaagatactgcagcattagcacaaggatagagaacaggacaaatgaaatgaaatagattccagaaacacatatatacaatcatacctgattcacacagtttccacggcaatacagtagggaaggagtggtctttttagtaagtggtgctgattgattttgggtatgtatatgaaaaaattagtcttcatgccttatcacaccattaacaaaaaatcagtttgagatgtctcatcaaaacagtaaagcttctagaacatagaaggaatatctttatgtcgtttgtagacaatttcttaaataagactcatgaaagataaaccataaaaccacgatttagatccaaatatgggacatttccagtgccccagcacccttcccagtcgacagcccagtttttaaaaaggtaggagggggcaaaacttgaatagacatttaataaaaagaaatactcacgtggccgataactatataatctcaaggtccattaatcctcagggaaatgcaaattaaagccacaataaggtaccactacaatttcaagagaagggcacttactaaaaggactgacagtaccaagtgctggatcagtagcagtggaattcgcagtatcggtggtgggaatgtaaatcgtttcaatcactctggaaatgtatttggcagtatctacactagacagctaaatatatgcagttccagcacttctcatagctatatacacccacgagaaatgattacatgcttaccaaaagacacgcacaagctcatagcagctttattcaaaattgccaaagaatcagcctcaaagtccatcaacagtgaaataaatttatacaaaactgccacagtcactcaacaaaattctacccagcaatgaaaaagaatgtgctactgctacacacagcgaaaatgcatctcacttattttatttcattttactttattttgagacagtcatgctctgtcacccaggctggagggcagtggcgcgatctcagctcagtgcaaactccccctcccaggttcaagcgattctcctgcctcagcctcccgagtagctgggactacaggcgcccaccaccacgcttggctaatttttctattttatgcagagaaggggtttcactatgttggccagcctggtctcaaacttctgacgccaagtgatccacccacctcagtctcccaaagtgctgggattacaggcatgagccatcacgcccagccatctcacttattttaaaaagccaaagacaagaatctttgtgtgattccatttatttaaagttcataaacaagaaaaacctctgaggtcagaataagggatgccttgttgggagcatttgactgggaaagggctcaaagactttggagctacttcttgacaatagggagctgatgagatgtcactgtgaaaaacaacctgacagttgatgacattgcttgctagcatctacagccacaatgcacatatggcctagcctcacttctgcctttcggaactcctggaagtcagtcgaacatattttcagctagaatccttgctgcaagggagtctggaatctctagtgttcatagccgtcttctttttagtttttacaggagaagactgagggtcagtgttgctaacaataacggaagccataccacttgatcctggctgaactgaagtttgaataataacttttgtttcacgagggaacccttgcagttgctccggctttttaaatgtttgatggtccttggttttgtgctctatttcctccttcaacgtcaaaaactgtagccggcacttggaacactgaaggaccctccttctgctgtgcctccaacaatgattcatgtatggtattgcagttttgaaaagtttgagacaaaacagacaaagcaaattctttgtgttttcatggcacgttctaaaatgtgtttccacatcagcaaagaccgacgatctgtaatggcaaacctggcacacgtagggcatttcgccaggcttatgatggtccttcatgtgttgtaagaggacctgatctgtttcaaatgacaattcacagattttacagacagcagagggccccatggcgatgtgtacactatcaatgtgacactgtagctggaagggagtgggaaactgccggtggcagtgctggcaggtggtgtggtcttcccagctgtcgttcctctgcttctcaaattccaaatgatgcttcatgtgattcataaacttaatattttttagaactttcacgcagctgaggcatttaaaggtggtgtgagtcttctgttccggctgcccatctcctttatgctgtccatagtaaaagttgctaagtaacacgatgggattttctttcttgggatcaaaggtcttgttttgacttgctagacttgaaatgtctgtcattgccaggccagactcatttgctctctctggatctgtaagattgaaatgtgcctttccattagcatcaggccaaggaaatgttactccattctgaacatggtttgatgagttgcagatcccctgtgagggtgtatttgtgcttattgtagaagacatatctgaagggaccacagctaaagaaggtacccctgggattccatccctgagtttaacccttttggaatctctgctgtttatatctgaagtggaaagtcgctttgaatcaggagaactctcatttctgcctcctccagagaccatagctccaactagacactgagtccctggggggagcgaatctgagtaattgggagaaacaacttgtggtgagctcattttataaccaggttcagatgaagacttcatagtgacaggactatctgtcgatcgcccctcagacagagaaacgggcatgatggcttttgccatagaggtcacatgatttgcaggctgcgacacgtgagcaggatattgacggaagtggcctttctttcttcttgactttgagcctggggtgactctgttcaaaatgtttgaaacgactggttttgaatttgaaatcatcccgacaaagagaacttcagcatctctatgtacatgctccaccccaacatagatcagatctggatcttcatcatcctcctccctttgtttggattctctcaaattcttctttggtgattccactttcttacacaaaaagatatctcccattttcaatttactttttgcttgaagccactggtctcttcaacttccagagctgtctttttacaaattgccacctaagtgcaaccatgtgacaatagtcaatatttatttcgaaagacaaaatcattactttattgtatcctcccttaaaacactgagataaccatcaacatctctattttacacgtcagaaatgaggcttgaaacattttaaatggcataataatttcaaatttacctgtctctcctcccctggtcttctgcagttgtgaggcaaaggaagcaagatttcaggaggtgcagatggaacatctcagagtgcttgcctctaaattttgcactctagatgcctcactcacctcctcctcatcccacaggtactctctcagatgtctaaggtttctaaccaacttgaacaaaacttctctcaaaaacattctgctcctagcctgggcaacatagcaagaccccatctctacaaaaaaatttaaaaattaaaaaaaattagcttggcatggtggtacacacctgtggtcccagctacttgggaggctgagccaagaggaacacttgagcccaggacttcaaagttatgttcatgccactgcactccagcctgggcaaccaaatgagaccccatcacacaaacacacacacacacaaatcacaacacacacacacacacacacacacacacacaccctttgctgttcctgtaatgttccttttctcagtaaactcagttgctcagtctacaaacttcagagtcatcctttgccagactttctctcatacactacagccaatcaattagcaaagctagtctgctctatcttttaaagatatccagaatctgactactctcttccacatctactgccacctccctgatggaaggtaccatgttctctccctggatcactgcagaagttgccagtcttaaaagttttgtcagatctccccatggtggccccaatgcccctgttaaaatatacaggggagcaagtatattttgctcttaagtcttcaatgactttccatttcattcataggaaataccagcaaactttaaatttctccatggaaccttaggtcatcatcgcccttgctaactcctctgttgctctgatgcagccatcctgagctccgtgaatctggaacacaccaggcctttttctttttcagaacttttgttgttcccggacattgcgtgcctctttccccagattaaccccatctgggctcctggtctgcctcagtcccatggttcctcttcagcaaggcttacctgaccacaatatcaaaaatcacaacctccttaactcatatgttcaaaccctcaatgttatttttcaacttagcatttatcactgcctaccacacaatatgtaaaatatatcttgcaagcccaggagtttgagattacagtgagctgtatcatgtcactgcatccagcctgggtgacagaggaaaggaagactctgtgtcttaaaacaacaacaaaaaatgggacaggtgcagtggctcgtacctgtaatcccaacactttgtaaggccaaggcgggaggattgcttgaggtcaggagctcgagaccagcctgggcaacatagcaagacccatctctacaaaaaatttaaaaatataacttgtttcttttctgtgtttacccactaaactgtatgccacatgagggcagggagttgtgtttcatttactcctcagcttatagagcaatgtctgtcatactgtgcatgctaaatctttgttaaataaatagtagctgttattaatatgatcatttaggtgtaccagaggctctaatccattattccagattctctaagcatttaatgaaatccaaatccaaatgatttaatactgttgtacaagggagaaggtaaacctgtgtgtatgtgtgtgtaaattgaaacaaaagttttgtcaaatactctaataccttcaccttaccgcaagggataggctctgataccttctatgccatattttattgattctaaggtataggcttagatttccattttaacatctctaaatcagattgcatctcatcatagcatctcatcaatataaaatacatttcacaatttgtttttgcagtatatatttttatttcatagtggaatcaaaaatgacatatctcagatccttttgtgaggataagcgtgatgcttgggttttcactcatgtgagatgtgcttccctcaaaccttgttatatcagcatgtttaacatctgatgtaaaaaaaaaaaaaaaaaaaggagagtaatgtatcttttataattgatggcatctttttttttttttttttgagatggagtctcgctctgtcgcccaggctggagtgcagtggcgcgatctcggctcactgcaggctccgccccgcggggttcacgccattctcctgcctcagtctcccgcgtagctgggactacaggcgcccgccacctcgcccggctaattttttgtatttttagtagagacggggtttcaccgtgttagccaggatggtctcgatctcctgacctcgtgatccgcccgcctcggcctcccaaagtgctgggattacaggcatgagccactgtgcccggccaattgatggcatcttatagtcagtgaaaaatcctatttctttttgtaagctgacagcccactaaacttgttttgtagttctctaatggatatcacctacattttggcaaacaatggtttaagacagaaattggaaaattggcccttcccctgtttttgtacagtcaggaagccaagaatgtttcttacatttttaaggtattgttttcttactttttttttattaagatttttttaaacttgtacatttttagatttgggggaataaacacgcaaaaggaagcggggcgcggtggctcacgcctgtaatcccagcacttttgggaggccgaggtgggcggatcacttgagctcaggagttcgagaccagcctggccaacatggtgaaaccccttctctactaaaaatacaaaaattagccaggcatggtagcagatgcctgtagtcccagctactagggaggctgaggcaggagaatctcttgaacctgggaggtggaggttgcagtgagcgaagatcgcaccactgtgctccagcctgggtgacagagtgagactgtctcaaaaaaaaaaaaaaaaagaaaaaaggaatattttgtgatgtgaaaattatataacattcaaaatgtcagtgttcactataaagtgttgtggaacacagccataatcatttttttagtgctgttgtccatggctgctttcacacttctatgacacagttgagtacagtagtacccccttatctttggggcatatgttccaagacccccgaagtggatgcttgaaactgcagatggaaccaaattcaatatatactatattttttcatatatgtacatacctatgatcaagcttaatttataaataggcacagtaagaggttaagcataacaaaataattataacaatatactgtaataaaagatatgtgagatagtgcgtggtggctcatgcctgtaacctcagcactttgggaggctgaggtgggtggatcacctgaggtcaggagtttgagaccagcctggccaacatggtgaaacccatctctactaaaaatacaaaaattatctgggcatagtggcgagcacctgtaatctcagccacttgggaggctgaggcaggagaatcacttgaacccgggaggcgtgggttgcagtgagccgagatcgcgccgtggcactccagcctgggcggccagagtgaaactccgtttcaaaaaaataaattaataaattaaattaaaggtatgtgaatgcaatctctcgctgacaaaatatctttatgtactgtagatcttggcaaccttagcatacgattttgttttctttccttattatgttaaaaactttcccattttcacttaaaggaagcaagcactttacagcttctttttggcatatttcaatcgccagcattgctacccttgtactttggggccattattaagtaccataagggttaattgaacacaagcactgagataccaccaggacagtcactctgataactgcgaccgctcctaagtgactaaggtacagagagcgcagccagccaacagcatggggactcaggacaaagggaggattaccatcccagggcagggctgactcaagagcttatcacactactcagaagggctggcgacttaaaatttatgtattgcctatttctggaattttccaattaatattttggaacctcaggtaactgaaagcacagaaaggaaaaccctggataagggaagactactgtagttggagcagagaattgcaatacctaaaatatttgccatctagtctttcacagaacaagtttgccagctctagttttagaggagcaaaatgaaagatagcaaatttctcagctcaccagttcctaaagttgcgagtgcatccagatgattcagtgcagctcagtatgttccactctgggccacaagggaaagcgaagctggagcttccttgtctccacctccgggagaaatttgtccagagaccggcagcactgcttccgcaggcgaacaacgccgcttgctcttcaaagtcctttctgaggccagatcagaaggtcccactccttttaagccccttattgcccaatcatttttccagtcacgtgtctgaagcagtttatcctgattggattttcagttgttgtccagcttgattgccaaaagttttcctccaattgctactcaaaggaaagaatgagggtggggcttcagggctgctttccaggttgattgagctgctgatgggcatcctccctcctctctctcttgttcagagtctaccactttctctgcagtgtgcctgggccctcagctattggggatgagaagggatgcggagtgggaggcagtccacatgtctgttccaacaaagctcagaggtgagcgagttaaaaagcagatgtctttccagtaggagccccaggggacagggtgggtctcacagcccttgaagaccgagctcccgtaggagtttccaggtgtccaaacagggtcctcactgtgagtcttcaacagctttctccaagcagcagcccactcccttcttaatccatttccaggggtcaaaggtctatcctggttccctcccatgccctctcacttccttccctctgtctctccctcctccctcctccttcactaccccctccctggaaccttctcagctgaatttcaggcccaccctttcactctctttacaggctttgcaacacagattagaaagcgggggagggggagcctcaagagtcccttgacaggtaagaaatatttatatttccacccccattccaacgcaatgcaatcaagtctcaaaattaaaacgaaaatcatttgcaaattaaaatgttctaaagtaccatctcctgataaaactttaaaaatacctttctgggccggatgtggtgactcacatctgtaatcccagcacttttgaaggccgaggcagcagatcacatgagcccattagtttgagaccagcctggccaacatgatgaaaacctgtctcttattctttataaagtaaaatacaaaaatttcctgggcgtggccgtgcgtgcctgtaatcccaggtactcgggaggctgaggcagaataatcacttgaacccagtaggcagagcccaaggtggtataaaagtgtgtgacccatggtctttattcttgtctagggactggggaaaggctgcttgagggcattgcaagtagccaagagcatgcccctggaaaggaaggtgaaatgaggcccgctactgaggtacacctgtagtcccagctatcaaaggctgaggtgaaagatctttgagcccaggaaatccagacaaacctcagcaaaatatcaagacctctgtttctacaaaagaaaaaaaaaatttttttaattagccaggcattgtagcacgtgcctgtagtcccagctacccgggaggctgaggtgggaggattgcttgaaccagggagatcgaggttgcagtgaactatgattgcatcacatactttagcctggatggaagagagagaccttgtctcattcattcattcataaataaataagcaagcaaagtgaaatgaagtgcaagacttagacagtaaagttctaacaggggccgggcgtggtggctcacgcctgtaatcccagcgcttaggcagaggcaggcaggtggcttgagcccaggagtttgagattagcctgggcaacctggcaaaaccgtgtctccacaagaaaatacaaaaaattagcctgggtgacagagtgaaaccctgtctcaaaaaaataaaaaaagaaaaaagaaaggaagacagagaaagaaagaagtaaagaaagagaaaaaaaggaaggaaagaaaggaaaggaaatgtgtattctgcagaactgatattcactccttcctcttttccagaagcagaatcctgctaggaagattccaggaagcctaggcagtggtcaggggctggctcaggtataaagcaggcccttcccctgagacagaaggttgtggcaacaatgcttgtgggaggtgagaaaattgagaggagtgtctagaaatagctcggagttgcatcttattttcttttgctcagttttaaaagtcccaaataagaccacatctagctgttctaaccaagctattctaacccactaatctagtaaaaataaaatcacatggtctgaatataaatttgcatcaggatacatgcctttcctatgaaacatttatgtttccttataaaatgtatcctccttttctgcagaaaactaactgtaatgcatccaaaggtcacagaatgtggtgaaacatcctcatcattgatttttaaaaaaatttttatttatttatttatttgttttttgagacatggtctcacattctgttgcccaggctggagtgcagtggaacgatcatgcagtcttgatgtcctggacccgagcgatcctcccacctcagtctcccaagtagccaggacaataggcagatgccaccatgtctaactgatttatttttatttttgagtagagatgaggtctcactatgttgcctgaactggtctcaagctcctgagctcaagcaaacttcccacctcggcctcccaaagttctgggattacaggcgtgaactacccgcaccctgccctccataactgattcttttttttcagacttcactctgttggccaggctggagtacagtggcgtgatctctgctcactgcaacctccgtctcccaggctcaagcagttctcgtgcctcagcctctcaagtagctgggattacaggcatgagccaacacgcccggctaatgtttgtatttttagtagagacagggtttcaccatgttggccaggctggtcttgaactcctgatctcaggtaatctgcccacctcggcctcccaaagtgctaggattaaaggcgtgagccaccacgcccagccatagctgattctttatcagtctgcctttgggaagtttccactgggaaacactctccaggactgtttcggaccagccccactttccaaacaaagaattccagtgatgagattaaagcttgtcacaatatgtttttcaaatgactggtagaagcagaccttaagattaaaaaagaagaagaaaaaatggctgaaatcttgaatcctttattgctttaaggcacagaataggaaatggatggcgcgtcgggaatggatgcaggtcagggacagaccatcactcatgccaccttgctgtgtttatgaaacagagtgctagaagttaaatttgggggatgcacaaagagatgcctaatcagatgaactcagagttggaattgctgtttgtgagacagttacatcaaaggaagaaaagaaggagagaagaaaggtgactatcaggagaattttccagccagaagaaagacacagaggcacaggcatttcatggcctgaaaaaggaagagcacagagacaagtgtggctccagttaaaggaccagcggagatgaaagatgaggtcagtgatttgggtaggggacatagcagttaagatattgttggtcaaggctgggcgtggtggctcacgcctgttaatcccagcactttggcaggccaaggcgggtgaatcacgaggttaggagatcaagagcatcctggctaacacagtgaaactccgtctctactaaaaatacaaaaaaattagccgggcgtggtggcgggcgcctgtagtcccagctacttgggaggctgaggcaggagaatggtgcaaacccaggaggcggagcttgcagtgagccaaggttgcaccatagcactccaacctgggtgacagagtgagacccagcctcaaaatactactactactaataataataataataaaaacaaaacaaactaaaacactcaggagagattagtggtctaaaagcatatttttacaatgtattcagggttattccattgtttcttaaaaactacctttgggagcatctccccaaacttagtttggaagtgttttttctgggttgcaataaacaagcaaacaaaaaactaccttttaattaaaagtaatccttaaatagagctaacaataaaatcaaacacacaaaaaaattatccattttaaaattttttttatatgaagtcttgctctgttgcccacccaggctggagtgcaatggtgccatctcggctcactgcaaccttcaccccccgggttcaagcaattctctcacctctgcctcccaagtagctgggactacagtcacgtgcgagcacacccagctcatttttgtatttttagtagagacagggtttcacaatgttggccaggttggtcttgaactcctgacttcaagtgatcccctgcctcagcctcccgaggtgctgtgattacaggcgtgagacaccgcacccggccaaaattcatccattaattgtaaagtaaatttcccttctgccccagatcacagttacctgtctctattcccaaaataaatggctgtgtagaatttctgatgtgtccttcaatatatattctctgcatctacatacacttaccttcccctacctttttatgtaaatgggtgtttattattcacatactccgtattaaaattgtgatttattaacataattttactgacattttaatttgaatggagataaatttataaaggggattgatgattaagattttatgtttaaatattcggaagcaaacagtaatgcatcttatcttctgagtaggatgtgggttgaaactgcaaaggcaagcatgagatgtttcattaacacaaagccttgagtgctccaaacccaaaagtcaaagcaacttatcaataaatgccaaaggatgctattctgacatatctgtgtgctgtggtttgaatgcagactccaaatctcatgtgtgggaaacttaatttccaatgtgggactattgaaaggtggggcctttaagaggtgattgaatcatgagggctctgccttcatgaatgaattaatccattcgtggattaatgggttgatgggttaatggcttatcatggaaggggagctggtggctttataagaagagaagagagacctgagccaacatgctcagcctccttcatgagatgccctctgcggcatcaggatgctgcagagacccccaaccaggtaagaaggcttttaccaggcatgccccctccactttgggcttcccagcctccataactgtgagaaattcattttctttataaactacccagtttcagatattttgttgtaagcaacagacaacggactaagacactgtgttatctaattatgtgattcttgttttactatttatttatttagccacttgtcagaaaaatttttttttttttgagataaagtctcactctgtcacccagactggagtgcagtgctgctctcatggctcactgctgcctcgaactccctggctcaaacgatcctcccaccttagtttttcaagtagctgggactactacaggtgtgcgccaccatgactggctactacttttttttttttaatattgcccaggctggtctcaaactcctggcctcaaaagatcctcttgcctcagcctcccaaagtgctggcattgtaggtgtgagccaccacacccagcccaccaaaagttttttcagacatgtacctgagtgattaagagtttaggattggctgggcacggtggctcacgcctataatcccagcagtttgggaggccaagacgggcagatcctgaggtcaggagttcaagaccagcctgaacaacatggagaaaccccatctctactaaaaatacaaaatttgccaggtgtggtggcacatgcctgtaatcccagctacttgggaagtctgaggcaggagaatcgcttgaacccgcaagggagaggttgcggtgagccgagatcgtgccattgcactccagcctgggcaacaggcaacaagagtaaaactctgtctcaaaaaaaaaaaaaaaaaaagagtttaggatctatattcgctctgcctgggtccaaatcctggatgttattaactgtatgactttgggcaagtttattaacacctccattttaaaaaaatctgtactaggaatataataataaatgcataccctctcaggatttgattaaatggaataaaatatatagaattcctagaacagtgccaggagtttgaggccagcctgggcaacatagtgagaccccatctgtacaaaaaatacataaaaaatgaggggggaatagcggtgcacacctgtggactcagctacttgataggctgagatgggaggattgcttgagcccgggggccaaagctgcagcagtgcagtgactgcgtcccagtaatcccagcactttgggagggcaaggcaggaggatcccttgaggccaggagttcaagaccagcctgtgcaacataaagagactccatctgtacaacaacaacaaaaattcttacgcacttagtatttgccagatataatgccaatttctagggcacaaaggcaaatggtaactacctccctggattgttgtaaaaataaagcatgcaaaacattttgtgcccccaatgatcccttcctcatggtgtccccacacttttattttgtgctgtcacaatgagcagggcaccaccaggatactgggaaataatgacgtgtgatttccaagaccaggtcacaaaaaacattttgccttgccctcttgaatcacctgctctggtggaaaccagacaactgttatttatgtcatagcattcaagcggccctatggagaggtccatgtggtaaggaactgaggcttcctgccaacagccaagtgaaagagccatcttggaagaggatccgcctcccaagttggccaagccaacattttgagtataacctcataagagtctctgagccagaaccacacagctaagctgcagtaactttgaagtaataatgatttattgttgttaagccactaagttttgggataatttgttatgtagtaatagatagctaatacagttgtgcttattacgtttggtactcgttactatcaccaccacatcagtgcattgtagaaaacaaattctatgtattaaactgttttgtttcccctctggattaagctgggctcacaaggggaaaggtgcccaccagagtttttttcttttttatgtaatcaagtttttaaaattttattctattctactttatttttttaagttccagggtacatgttcaggatatgcaggtttgttatgtaagtaaacatgtgccatgatggtttgctgcaactatcaactcatcacctaagtattaagcccaatatgcattagctctttttcataacgctctacctccctcctaccctcccgtaaaaggccccagtgtgtgttgttcccctccctgtatccatgtgttctcattgttaagctctccacttataagtgagaacatctggtgtctggttttctgttcctgcattagtttgctgaggataatggcttccagcttatggatgtatagtattccatggtgtgtatgtaccagattttcttttttcttttctttttttttttttttttttgagacggagtctcactctgtcgcccagctggagtacagtggcatgatctctgctcactgcaacctccgcctcccgggttcaagcgattctcctgcctcagcctcccgagtagctgggattacaggcgcataccaccacgcctggctagttttttgtgtttttagtagagacggggtttcaccgtattagccaggatggtctcaatctccttacctcaggtgatctgcccgcctcggcctcccaaagtgttgggattacaggcgtgagtcactgcgcctggtcagtaccacattttctttaaccagcctgtcgatggaaatttgggttgattccatgtctttgctactgtgactagtgctgcaatgaacatacacaaaattatctgaatgattgcagtaaacatcatatatttgtttgccagctaccataataaaataccatagattgggtggcttaaccaacagaaatttattttcccacaattctggaggctggaagtccaagatcaaggtgttggcagggttggtttcttctgaggccttggcttgcaagatggccaccttcttgctatatctttacatgatcattcctctgtgcgtgttcgtgtcctaattttttcttcttataaggacaccagtcattttggattagggctctttcatatgacttcattttaatcttaactgcttctttaaaagccctatctggaaataaagtcacattctgaggttactgggggatagaattacaacaaatgaattttgggaggacacaaatcagcccataacacatcattgccagcatcacatgtggagcattcaactggagaaactgccctaatttctcatttgaaggtctaaacatctcttttatcaaaataagccaggttctattaagaaggctgaatgtgcatctggctcgatcaacaggcgtctggctgcttcaaatgcttgatttttttcattctcagagaatgaaatcaatgttgaaatattgagtatattctatacaaaatcttcatgtcacaatgaataagaaaagtagttttttttgagacaggatcttgctctgtagctcaggctgcagtttttggagtgcactggtatgacataactcgctgtagcttccatttcttgggttcaagtaatcctcccacctcagcctcctgagtagctgggactataggcatgtgctaccactccaggttaattattattattattatttttgagacggagtctcgctctgttgcccagcctggagtgcagtggcgccatctctgctcactgcaagctccgtctcccgtgttcacgccattctcctgcctcagcctcccaagtagctgggactatagacgcccaccaccacacctggctaatttttcgtatttttttagtatttttttgtatttttttaatagagatggggtttcaccatgttagccaggatggtctcagtctcctgacctcgtgatccacccgcctcagcctcccaaagtgctgggattacaggcgtgagccaccgaatccagccactccaggctaattattttattgtatttttagtagagatggggtcttgctatgttgcccaggctggaatcaaactcctgggcttaagcaatcctcctgccccagcctcccaaagtgttgggattataggcaccagccactgcacccagtcaagaaaatattttctaatactgaatacagctaaagaatggatggtaaaccattattgtccagtcaggatcactgtcatccaagtgggacactcagtatttgagattctgggtggtgctataatacttgttgccttggtatctgagtgagcacttagtctaagtataataattttctggaggagtatattagggttctccagaaagacagaaccaatagaatggatgaatagatagatggatagatagatagaaagatagattgatagggccgggcgcggtggctcacacgtgtaatcccaccactttgggaggccaaggcaggcagatcacgaggtcaggagatccagaccatcctggctaatgtggtgaaaccccatctctactaaaaatacaaaaaactaaccagacgtggtggcaggcacctgtagtcccagctactcgggagctgaagcaggagaatggcgtgaacccgggaagcagaacttgcagtgagccgagatcacgccactgcactccagcctgcgacagaacgagactccgtctcaaaaaaaaaaaaaaaagaaagatagattgatagatagatatgtgagtatgtgaggggatttgttaggggaactgtctcatgcaattatgaaggctaagaagttccacagcaggccatctgcaagctggagatcctgggatgctgacagcatggctcactctgagtccaaaagcctcagaactagcggtgtaattctcagtccagtgctgaaggcctgagaagctagggagtgagggtgcactgctagtgcaagttgtggagtccaaagaccagagagccttgagttgtgacatctaagtacaggagaggaagagtgtatctcagctccaaaaggtagatcaacacattcacctttcctctgtttttgttattttcagtactggcctttggatggcacccacctacatggagggcagatcttccccacctagtccactcacactcatgcgttaatctcttctggaaacacagacacacccaaagatagtactttaccaggtttttaggtattctttaatccagtcaagatgacacctaaaattaaccatcgcaagggtatattcaatctgaatggccaaaattatctgatagagccttcagatacttgtacttaacagatgtactcttgggattaaatgagtttatgctcaagaaatgatattagccaggcataggggtgcatgccgttgtcctagctaccgtggaggctaggacaggaggagcattgcttgagactgggagcttgaggctgcagtgagctgcgatggttccactgcactccagcctgggtgactgggcaagaccccactgcaaagagagagaggcagagagagagagtagaaatggtatctgttattttacattaaaagttctggaataggggagtgctatggtctgaacgtatccctccaaagttcatgttggaacttatgacccaatgtgatagtattaagaggtggggcttttacgagatgactaggctattagaggcctacccttatgatgaatgaattaatgtccttatcaaaaagattccatttccactatgctgagagcggaaaacaaacaaacaaacaaacacaaatgaggttccacacagcactcatcctttttgcccttccacccttctgccatgtgaggacaaagcagcaagtctccattttggaagcagagagcagccctcaccaaatctgaatctgttggtgccttgatattgaacttcctagcctctagaactgtaagaaatgtttctgttttgttgttgttttttccgagacgaagtctcgctcttgttgcccaggctggagtgcaatggtgtgatcttggctcactgcaacctccgcctcccaggttcaagggactctcctgcctcagcctcctgagtagctgggattacaggcacgtgccaccacgcctggccaatttttgtacttttagcaaaagtggggcctcaccatgttggccaggctggtctcaaactcctgacctcaggcgatctgcccacctcggcctcccaaagcactggaattgcaggcacgaaccaccgctcccagctgagattttctgttctttgtaaattacccagtctcaagttattttgttatagcagcaaaagcaaattaaagaaggtataatatcaggctctcttctgattccctaggctctgctgcacgaattgttatttccagaagttcccataggaagttctcaggaaatgaaatggatatgaggtaacctcatgtcggggagtcagtctatggaggatcataatcatacaacaacatggtccacccttgctataatctattttttttttttttttttgagacggagttgctctgtcacccacgctggaattcaatggcgtgatctacgctcactgcaacctctgcctcccaggttcaagagagtctcctgtctcagcctcctgagtagctgggaccacaggcacacaacaccacacctggctaattttttggatttttggtagagactgggtttcgccatgttgcccaggctggtcttgaactcctgagctcaggcaatttacctaccttgccctcccaaagtgttgggattacagtcgtgagccactgcacccagctgttttctgttttctgacttttatttttgagacagggtctcgctctgttgcccaggctggagtgcaatggtacaatctcggctcactgcaacatctgcctcccgggttcaagtgattctcctgtctcagcctccacagtagctaggattacaggcgcctgccaccacacccagctaatttttgtatttttagtgaagacatggttttgccatgttggccaagctgttctcaaactcttgacttcaggtgatccgcccaccttagcctaccaaagtgctgggattacaggcacgagccactgcgcccggccttgttttctgttttgtttgtttgttttttaagagatagggtcttgctctgtcagctaggctggagtgcagtggcacaatcagctcactgcagccttgaactcctgggcccaagaaatcctcccaccacagccttctgagtagccaggactataggtgagcactggttaaatttttaatttttttttgtagagacagagtcttgctatgtagtataggctggtctcaaattcctagcctcaagtggtcctccagcttcagcctcccaaaatttgggaatttcaggcatgagccactgcatctgaccgtacaaaatgttaataaactggccaggtgtggtggctcatgcctgtaatcccagtactttgggaggctgaggcagggagatcacctgaggtcaggagtttgagaccagcctggccaatgtggtgaaacccccatctctacagaaaatacaaaaattagccaggcgtggtggcccatgcgtgtaatccgagctacttgggaggctgaggcaggagaatcgcttgaacctgggaggcggaggttgcagtgagccgagatcagagcactgcactccagcctgggtgacagagtgagactccgtctcaaaaaaaaaaaaagttaataaaccttttactcctggcctcaagtgttccggctgcctcagcctcccaaaatgctgggattacaagcatgagccatttatttttctttttttgagacgggagctcactctgttacccaggctggagtgtagtagcatgatcacaactcactgcaaccttgaactcttggattcaagtgatcctcatgcctcagcctcctgagtagctgggactataggtgcacactgacatgctcagctcattcaaaaattttttcataagagatggagggggggtcttgctatgctgcccagcctggtcttgaactcctggactcaagcgatcctcttgccttggcttcccagaatgctaggattacaggtgtgagctactgtgcctggcttttgatttttagacagggtcttgctctgttgccgaggctggagtgcattggtgtgatcatagctcactgcagccttgaattcctgagtttaagtgatcctcctgcttcagtctcccaagttgctaggactacaggtgtgtgccaccacgcccagctactttatgaacgttttgattccaaagtctgaaaaaagttttccagattcatctccaggtcaaataatgtccctgctgtcaggcatcctgctttagaagcaagatgtagcatttttcttcctttacttgcagcaggcagctaataactgttatcctgtgctggaccatccatgttctacgcattctaacatgtgctttacataaaaaattagcccaagtgaccctcactgtgacattacacggtacgtattattaatctttttttttttttttttttttttgaggtggggtctcactttgttgccaaggctggagtacaatggctcatgcctgtaatcccagcactttgggaggttgagttgggaagatcccttgaacccaggacttcgagactagcctgggcaacataggaagacccccatctctagaaaaaataaaaacatagccatgcatggtggcatgtgcctgtggtcccagctacttgggaggctgagaaaggaggatcacttgagcctgggaggttgaggctgcagtgagccatgatcatgctactacactccagcctgggtgacagagtgggaccctatctctaaaaagagagagagagagaaagagggagagcttttaaaaaatggcaaaatgtgcccacagctgatgggcctatttttcttttttttttttttattgagacggagtcttgctctgtcacccaggctggagtagtggtgtgatctcggctcactgcaacttctgcttcccgggcttaagcgattcccctgcctcagtctcctgagtagctggaaatacaggcacccgccaccatgcctggctaatttttgtatttttagtagagacagggtttcaccacattggccaggctggtctcgaactcctgacctcaggtgatccgcctgcctcggcgtcccaaagtgctgggattacaggcgtgagccactgcacccagccaatttctatttcttatagagcttacggtaggaggcttgaagatgggaacagaagaaaaaaggttgaagggcccagctgctgtgtgttgcaagacaggaaattgctgacagtctgcaatgccagcagcctcatgggtggttatcaccaggacagaggcctcagaacaggcaggactgggtgtgctggcactcacggctacgtgcagatagagcccgcccctgggccttggtgtgtgaccttcttcccaggtgcttctttgggaagctgtacagtgagggagatgaggcagactaagggcaggacacactagcataggagcggtggcagctaagtaggctgactgcccagggattgcagagttcacctgcacagtatgacatctctcatccttttggatagattgttctataaggtggcctccacctacccccaactcccaaatctgacattcattcatctacttcccctgaagtgctccctagcacttgccatgagtttgttcactcttgggaccccaaatccaaggcatctcactggctgagattcagtttaccacctcattgatggggggactcttatgtcacagaagtaattttctcactgataggacccaagatgtcgtcctatttttaatgtgggtacaaatactaagtaaatatgatcttagtgttttgccaaaaggaattaagatgtttttaatgggtcacaaattcagaaaggggttggacctggtgggacaggttggtgaggcccagaagctccacttcaagtgcagtactggacatccccttccagtacgggaggtctgacttgtgcagtcaagcccaatactggcacagccacaggccagggatggaggcttatgagtccactggaaaacagggaggactgagtccagggtctcaagggtttagtagtgagggctcctgtgaagaacccttcactcagtggtgttcattaccggccccttccttagtatgttccaggccctgaggatgtaccttgcatgctctgaccctttgaacaccaaagaaataagcaaggagataacagatgccccaaagagatgaatggtgtcatgagatctgggggctgggaccttgtccagcctaaaggtgtaagtaccatggatgagcagtgtcttatttaatcagcaactagagatttcctgaggtttaactgggaaagcaggttcatatactacaagacaccaggtgcttcacattgcttctctttattttcaacagtttctttacaacagtctacacagggattaactcctacatgtacttcccaagccagaatctccctttagaaattcagattctatttctaactctataagatgtatctccccaaagatcacattaactcctcaagtcaacatctgcctatccccaacttcccctttttttcctcactgaacatttgtctgaatgttttttcctcactgaacatgttttcctcactcacactgaacatttgtctgaaactgtggctgctttgttgcttcaagatgcatgcacatcctggctttagtgtccaagtatgcagaatgaagcatttgatatgtgcacccagctagttaggcatgaaacaggggcacaggatgggctccgggtcatagaaggttctgtccccacagtgaggacaggggttggcactaagccagaccatgctgggccgccccaactcacacagcaactccctgagcctggcatgcagataggcaagcctctccaggtggagggtaccatggatgtcctcataactctccagggggacaggatacagcacgtgggtcagattgctcagcccgatgaggtgctgcaggagactctgcaaggcagatatggagatggaattcccgtagaagcttaaggttgtaagctgggagcagtggctcagggaaggcaggagggcaaggagctgatcatccgtgatcccacactcatcaaagaccaggtcctggagggtggcagaggctctctccagcagagcttggaggggctcgggacttacatcggtcagcatgaccccacttagactcaggacacttagctgactgacgctgggactctgggacagatgcatcacatccccttccgaaagccggcagttagttattgagagggtttccaaggggttcatcacgtgcctgcaaatagacaaagcagttagtgctggggaatggtggtagtggggtggggagactggagagaggcccatttcaccaaaacccaaagtcttcctgatgatggttaaccgccaggatgccatgctgtaaaggagcattcaaggagtacaagttcaggtttagtcctttctccatcatttgctgtgtaagtgggtcaagtaaacaaagatctcaaacactcccttggctgatctgtgaggcagggtccaacacagacctcttaggtggtgtgagcatgaattgaattgagagcctgatttgatgtctcaagcaaggaaaggcatcagtgaattttagtatttgaagatacaactgaaaatactttctttcaactcgggcttccttctgccactgcctgggccccagtcacctctatctctgtgcctgatgaagctactagggagtattcacagtggacaaactggggcaaggtcagcaacatccaaagggggttcccaggctgcagggctaccttaggtcactgtatcatcagcaaaccacctatcaatttttgcaatttctctgttgttccttctcccacatctccagaatcctgcatttcccacctattaccctaactggaattctaaatcaccctttacagacaggaaatttgaggcaggtttagagggagcagctcatgttgagaagctggtgagcgcacagcttacaatttcaaatctcacctttgatgggctttcccttcttcaatgccctccttgcttacttttgatcatcttaggcatcacttcctaaggaagaatgcctaaagccacccttgccaggccccaacctcccattacagagttttctaacaaggagtcactgttaatagcatctatcctaatgtatacctctaacccttatgagtagtagttatgtgataccatgcttggggacagtggtgaacaagacgtgttaactggtagtgacttgctcactcttgcattattggtggctggcacatacaagatatcctttattgtttactgcaataaggaagggcttgctctggtctgcagagaaatctcaccatccctcacctgagcaactgatccaggcggcctctaaggaaaaataaagagtccacatagagagcctgcaggcactgcagactgaggaactgagaggtgaactgggcgatatactgctcttccttctccggggaaatgtaggaagatgcatggatgtgggagaggaggagtctacgcagattaatcatctggcccaggtaaggagaaaatttcgccaaggtgggtagcttccaggtacaagtcacttccaaatcttcaatagagtccagctgcaccattttcaggatcatcttgatatcctgcatgggcattgcaaaaatcttcagcttcttacagcacaggcgtagtacatttttctttcgcttcactttctcaatgaggtaggagaacaattcatcacaggcaccttccttgaggaacaggtctacgagcacctctactggaatgaagggctgctctgcctctgtgctcaaaccatctacttttcgcttctttgtcatgggctgagctgcttctggctctggaaatgagtacagactggccctgtttccagaccatacagtccagaagtcctgatgagagttcttccgtaaatccagcacttgaagtttccacctcctgtggggaaaaacaggtaattagctgagatgatgctttaagatcaactcaaaataagaccatgagtctcataatgtaggtaagaaccaaacagacatccaccttagatctgcacttttacttcgtacttcaggcatcagctgctccctttcccactaggatcctgggatccttcctggtccccaattcccaccccaccaggaggaagcaggtgcatgttccttcagacacctctgcattttaatcagtgccccatgtccagaagcccattccaagagtgacccctgcagtagccccaaggcctccctgaacttccttgctggcaaccatcagagcctctggcccagccttaggcgctccatgctccctgaccccagctgcatcctgctcaggttcccagggccccacaccaagctgctaggtcacccttacctggggcgaacctcctgggcaaggagcacatcaagtccatcaagcacagctttgaaggtctccaggtgaagatgttgtcccttcatcagcactcccagagggaggcaggtgaagggccaggcctgcaccattgccttcagggtctggctgtgtctcccgtcaaaggctgccatgaagagtggcgggaagagctccctgggcagcaactccagggcggcaatggccagggcctcatccttcagcaggctctgccctgccagctccacaagtctccgtgggcttgtccacacactcatgctgatgtatcggctctgaatggaaccctgaggaaacatacagggaacaaggcatccctttcagcccaagcataagcaactctatcttttcctcacccttctgagggaccaacttagggccaaagtcactgtgctagcaacagcaggggagttctcagtttaccccgattccactctgcactcggtggccacaaagccacagctctgctggcaccaggatgaacatctcatcaagtgtagaggaggggacaggacggccactggcaccatcttgtatctacccactactctatttaattctagtccccctgggaagtgagaactaaggagcctgagggctgaccctgctcattttgggaaaaagtttctgatgatcactcaaaggcaattcaaatgggagtgtcacatagcccaggacagcatccttctctgctccaacaaataagccagatgggaaagatgaggaacacacacacaatgcacaatggatgccattatgtttcactaaaaaattttaaatgagaaactacagaagcagcacaacagtattacatagcaattggaagtacaataaaaaaaaaacattctgagacatgtattttaagtgcgtctcttttacgtatattaagagttactactttgacatggaaatcagcggagcaaacacttcacagtaaaacaaagcctggttcttttctcccaaaacattagttttaaaatggagaaataaaaattgtgtatatttatggtgtacaatatgatgctctgaaatatgtatacattgtagaataggtaccttaagctaattaacatacatatgatctcacatatgtgtggtgagaacacttgaaatatactcttagcaattttcatgtatacaatacattattaactacagttaccatcttgtatactagatatcttgaaaaagcctccaccctccagcacagtggctcatgtctgtaatcccagcattttgggaggccagggtgggagaatggtttgagcccaggagttcaagaccagcctgggcaacacaaggagacctcatctctattaaaaaaaaaaaaaagaaaaaaaagaaagaaaatgtctttaattccaaagcatctgaaaagaaaaagaaaaaaatctatggaatattttttaaccttttagttaaaatggaatattttttaaccttgtagttaaaatggaatattttttaaccttgtagttaaaaaaaagcctaactagtaaatcactgatttaaaaaatcataaatgatgcaaattataattgcttgccacatactatttaaattgtaataaagtaaaattcaaagtagatgtcttttattttccaaaaaaaaaaaaaaagccgtttaagaaattatttttaacatatacaaaatggcagaaatcaaaatgtttgggattcaatataaataataaatgttccaggtaatggttatactaattaccataatttgatcattacatactatatatgcataaactgaaatttcacatgtaccctataaatatgtacaattattgtgtatcaattaagaaatcaatccaataaccaaataaaaatgtttgggattaaggcaaaactacatttagagacaagaacaaagcctgttcctttgtaaggaaagaaaaaggaaaaccatctaagcagcattggccctcatggcccgtggagaccctgaggtgacagtagaaggaggcagtggccatagcctgaggctcccgactcaccagacccagctgtggtgcagaagccatctgcccagacctctgggaagaccacaacattgactccatggcctctgggtccctcctctggcccctctgaagctattacaggcctttctgggcatacctcccctttcaactccacgctgccaacggaagagccaaatctaattacattcctggatctccagccagtgaatcctgatggggttttttacttacttcaggttcaactgattgaatgggatgtctatttacaaaaaggaaagaaaaagtgaacaaaaccacccagagagtataactgttaggggaatttttggccacatcaaaattacccaaatagtccagttaagatagctttatgaagagcatcatgacatcaccccttcccactcccaaacaatccccaagtatcaaattgtcacttataccccatgttccctaacacagcaaatcacatgcctatccaaggaaaaagggaggaacaacagaggggtggctggtcttccagactttgaaagtcaaggctgtcctgaaggaaggtgggtcaaaattacactacaattaggagttagtcagaagtaaggctgggcatttgtaatgggactgagtggattaccacaaagacagataggtttttttgggggcggaattgaaagactttggcctggatggagtagagaaattaaaaaggggaatggctaaggaagatgaaagatagttccagtaaagccaaggtaatcactgaggcagggagggagttcaatcttcctccctccctagagggaaagggtgttttctcccagaaagtcaggatcctcttggcaaacagccttgacaagattaaatctaggaatgtgggctggagaggtgggatagagagtaatattggtgaccaaacctaggacagcaacattttcaagtctgaaagaccttgtggtttcttaggaatcttggagccaggaaagaaataaacaagggctgaaagcacacatccctgcaattaaagaagttgtcagaagaccttctctttatggttaggtgtcctcttccacactggggctgttcacaagcagcaggtcaggcctttaccacaaacataatctccaatggccagccccttcctaagtattactaatgtttccacacttcaagaaaacagctgttctttcttgcccctaagctgctcaggtacagagattctggtcagcgagatgcaatcaggcctatcaattagactcagtttttctctatttccatgctaggcacagtgcacaaatacattttccgtcacaaaaaattgaagttatatttggcatttaaggatctgcttagggatgattcctatcctgggcctgatcacccactggtgcttttgaagttttggaacctctccacccaaagaattctccaggccattctctgcctcatgcactgtgaagtccctacaattcttatattctactggcaagtgtccagctggaatgtcttgcggcctgactttgtttactgtggcctgcgtaaggaggctgtaattcgttgaaggatgttttccattttggttctctctctggagactttctcctacttttcaccctcaacacctaatggcctttgtgaaaaccgggttaaactacaatttgttctacatttcctttaattcccaggcaatcatcttcactcatcagctgcgggagactgagattagtaataaaggtcattgtcaatgtccctaattatcaagcagctactgggcacagcaaaggccgcagcagctctcattcattacctcaaatagccttcacagagaatctaaagttcactgtcattttcatttttagtcttgtaagtccctgactctgtctggggaagaacctgctcagctccaagcaagcaggaattggtagcccttatgtgaggagtttagaaagagtttcatttccctccctatcaaacaatctaagtgttagaaagggctgataagcttcacataaaccatggaaaaacaggaaaactgagtaagtccaacagttaaggaagcttccatgggatccccgcttccaggagatccaagggaggaggaggaaccgcgatcaagtgtgagttgtgtaatctctgagctgtgcaatctccctgtgaggcagtgacactcctctgtccagcttcacactgccagtttgtccagtggcactggaggaagcagcaccaggggcacatttgcacaaaggtgctgtccttcctcccagtataagggagaagtgaaaagactggggcccagcatgactcctagggtccagacatgaattggggagatatttctgcatgtcctgtctactggttcttatggtccttgtgggctgcacaggccagagtggcctctgagctcatcaggtgggtggtctgcaccctcctctctagtcatagaatcccagtggggacccccgaagtatctgcaccaggtccttcaggtgttttttttggagtgcagtggcgcaatcttggctcactgcaacctctgcctcctgggttcaaacgattctcctgcctcagcctcccaagtagctaggattacaagcacacgcccccacacacggctatatttttgtatttttagtagagatggggtttcaccatgttggccaggctggtctcaaactcctgacctcaagtgatctgcctgtctaggcctcccaaagtgttgagattacaagagtgagccaccatgcccagcctctttttcttttttagagacagggtcttactatgtttcccagactggtcttgaactcctgggctcaagtgatccacccatttcagcctcccaaagtgctgggattacaggcttgtggataccaacagcacccgagcacggtcccacagtccaacgcactgtgccgtccttgagcctttagttccagcacaagtctcccggcttcaacccaggttgcatgttctccctgatctccccaggtggcacccaaggatgaggcagtgcaatcttgttgctcacttcccaggaccgacacttacccctaatggcccaagcccatggggcagtgagatcaaagcctcctggagctcatactctctgacaccactggaagtgtgggcttttgcgtctgattaccccggggaaaggttctgaatgtaatcgtggctttggcaataaggtccacaatgcattaagatttttttttttttttggaggaggagtttcactcttgttgcccaggctagagtgcactggcaccatcttggctcactgcaacctccacctcctgggttcaagcgattctcctgctcctgtctcagcctcccaagtagctgggactacagatgtgggccaccacgcccagctaattttttttctatttttagtaaagacaggatttcaccattttggccaggctagtctcgaactcctgacctcaggtgatctgcccacctcggcctcccatggtactgggattgggattacatgcatgagccaccatgcctggcctagggttaatttttatttttggagacggagtctcgctctgtcgccaggctggagtgcagtggcatgatcttggcttactgcaaccttcgcctcctgggttcaagcgattctcctgcctcagccacttgagtagctgggactacaggtgcatgccaccacgcccagctaactttctgtacttttagtagacgcggggtttcacagtgttagccaggaatggtctcaatctcctgacctggtgatccgcccgcctcagcctcccaaagtgctgggattacaggcatgagccaccgtgcccgaccctagggttgactctcatacaaagacagcacgggaagtgaaatgctcttttgtggaaatgaccagaaacaataaaagcggctcctgcctcttcgtctactgtgagggacctcaggatgcagctcccatctggctcgagtgacaaggacagaggggaacagggcttctctgagcacctcagacagctcaggggaccttcttacccacaaacgccttcgttccattttgaagcgacttaggctggcctcaggacctccaacgcttggatttctaggtctcagtcacttgttgccacgcacgtctgagagtaataatcaaaatgctccaaaaagaagaatacatgtataatatttacgaagcaacggcctcctgtgaaaacctccgcaaatactgctgaggaaactgacaactggcgactcaatcccgccctttcagtgcaaatctctggctccaaacctgagcaccagtgtttcctgggctgaaccagggggcaggaggaacaacagaccatgtggttggtcacaagtgacccctgtggtcaaggaccctgactacggtcttgcagcgacatttctgcctctgctcccgccttcctaggacgcctacgccactgcctgggccgtccccaacccccagcaccttcagaggggccgagtcccagagcatccaccgcattacaaatgcgcacccaccctggagagctccaaccacgagcaccgccgcctcggttcaaggcatccttacagccacaactcctcaactggggccaattttccggggcaggcggcccggggtgacccaagtggcgcacattattttctttggtcttcaacccatttccagagagaaaacagggacccgggacaggggtggtgccgggggcacaagcccaaggtcaccctgcggggaagcggaggaatcagggctcgaacttacgtttttcctcagagagttcaccacaccgcgaagttgctggaaggaaagaacgagacaatggctcagctaagcgccctagccgctgcgtggggcggggggggcggcggtgggggccggggggctgggcagcctggtctgaccaatccccgtttctcagtccttccagggcaaaatctcacgagatccagtgaggtcgcccagagagtcgagaggggcttgttttcaaagactgggaggaggaggggcagtgggggaggggcagtggggggaggagcagaggagaagggagcaggaggaggggaaaaggggagaggaagttggagagcagaggaggctgggggtggggagcagatgggggtggggaaggaggggagatgggggtggggaaggggggcgggaggagggttaggaatgggggaaggaagacagggtgggggaggggtgggcatgggggaaggaagacagggtgggggaggggtgggcatggggaaagggagacagggtgggggaggggtgggcatgggggaagggagacagggtgggggaggggtgggcatgcgggaagggagacagggtggggaaccgagaagaaagacagtggggggggatggaggaaggaacacagggtggggtggggggtcgggatgggggaagggaaacaaagagtggtggaggcgtggggattaggaacggagacagagggtgggggaggggtggggtgggggaagggagacagggtgggggaggggtgaggatggcggaaggtagacaaggcgggggaggggtggggatgggggaagggagacagaagggggggaggggtggggatgggggaagggagacagaaggcgggccagggcgggaatgggggaagggaaacagggtgggggtggggatgagagaagacagaggttgggggaggggtggggatgtgtaagaaaaacaaagggttggggagggggagggaaaagaggcagagagtgggggagggggtggggatgtggaaagaaagtcagaaggtggggggtgaggggtggggatgggtgaatacgtgatggctgcggcctttcccaccagacagtagggtgggggcagggtggaaaaagggggtgcggtgggcgaatggggaggcggggggctgactgggagtgtgggacggggtgttctgggatcacggagacgtccaagtctggactctgtcctgggtctgtgcttctggcgacctcccttttcttcagtgggatgcggggtgcaggggccggttccaggtcccctgagctcaagtctcgccccaccccgccccgcaagtctagaaaagatgcccctgcccttggctgggtaatctctggatttacctactgtctgtaaccccccgggctgaagagaccaccccccgggagtcaattaacttactctctggagcgcgcgttcctccctgctcccaggagtcggtttcccaaaactttctgaggcccgcgcatgctcccctcgactccccgtgtttccactctccacagaaatccacgcattcacgcccctcccctcccccgagcctgcagaggactccgccctgctttccctacattcagggctgctccttttgtcgccaatacaaacctgttgacaggtcacgcctgggaagcgggtggggtgtcccggagcggtgctgaggcgctgcaggcccggcttctggctgcgggggagctgtaccctgaagcctcgccggaactcgcgtctggggccagcagggggcactagagtcaacagggactgtatgcaaaacccacttcctcccaggccctctagggggatggtcaggcttctgcagagatggggaggatcctttcctggtaaggggagagggacgggctaggagccaagcggaaggaccccgtgttcaaggcccttcaagggacgggacaggcgaggaatctctttgagtcttttgaattgttttatcagtcaggcctgggaagtactccgcctccacaaactctgttttcctgaaaggggtcgggggggggaccccaacatctcctgccacaggctatgatgggcatggtggctaagagcaacaggccgcgtggtgaggctggctttttgtggctctgccctgccattccccgaggcatccccatgccagtgaacagagctgcgggttcccagctgcacagatgaatgcacgaacaaaacataggtccatacaaaggaagtcattgcattgatccagattcgacctgggattgtcgcataaaacagggctgataaaaaccgtcgtgttttcaccctggaaacagagactcagcctccccctctttgcttgaggcattcagcaaaggtttgtccttgagtggctgtggatgctcaaggacttacgatttctgactttataaagtttagggtgaaaacaaaaaacaaaataaggagaccattgttttaaagtggccgttgtagctaattatctcaagaaagcaaacaggctggtactgaaagttacacaggcgggcggctccctgggagggttgcccagctctccttttctgagacctgagcagggagcagccagaggagcttgaagggatggtgttcagggcatgggaacaggctgcacacatcttcacggagtacggtgcttgtccagtttgagaagggaaagaaacgggagcagagggctgatgagaaggcagcagatggatagtgcgggattgaaaaggggatccatttgaagactggccaccattatttattttcatcatctgattgctgttgctccattgagatcgatgcgtggagaacaagttggggagtggaacaaatggcagggaggggagagaagtgagtgaacatgaccctggtccagcctcataggacagagcgtggtcatgaagtccacagaggaggacaggtagggaggaatcatggcatggccaggttgtagggcaagaggcagagaggagagaggattgtggaggatgcctgcggagtgccgactgtcagtcgaggctggtcctttatttatttattttttttttttgagacggagtctcgctcttgcccaggctggagtgcagtggcgcgatctcggctcactgcaagctccgcctcccgggttcatgccattctctcgcctcagcctcccaagtactgggactacaggtgcccgctaccatgcctggctaatttttttgtttttaatagagacagggtttcacgtgttagccaggatggtcttgatctcctgaactcatgatccgcccacctcggcctcccaaagtgctgggattgcaggcatcagccactgtgcctggccaaggctggtcctttcttttatggcgatgggtgtttgaaagttgcacataccaaaataaactcactatttgttgacccaaagtaaaaccctgagggtatgaaagggaagggctcatgcttacatggctgagataaaagctgtctcaggaagctgggtgtggtggctcacccctgtaatcccagcactttgggaggccaaggttggaggatcccctgaggccaggaattgaagactagcctgagtgatatagcaagaccccatctatatttttaaaaagggttggctgtctcgggacttttcgaaatagccctgcaagacattcctgttttggaatcacaacaatttagataagatgcttttgaaagaacacctgcctaggcacagcgtctccaccaatgaactgatgccaactgtggttttgagtcttcataaccggtgaactgtttgcaagcagcttatttaaatctctttttttgccaatacaaccttccctttgccctcccctcttgagatgcatatatggcttgccatagctgagcatcttaggttataatgctttttctcttttttaatttttttttgtaaatttatatttatttttatatttatttattttttgagacagggtcttgctttgtcacccaggctggagtgtagtgcataatcgtagttcaccactgcctccaactctcgggctcaagcagtcctcccacctcagcctcctgagtagctaagacaacaggcatgcaccaccatgcccagctaatttatgtatttactttattaaaaattttttttttttggtagagagagtctcactgtgtttcccaggctgggcttgaactccaggcctcaagtgttgctcccaactcgacttcccaaagtgctgggattacaggcatgagccaccatgcccagcgtataattttgtattctaattcctgaataaattcaacaaatttggaggtgttttttgtctgatggttccttttggtcgacaactggaatgggagaggaacagtgtgagggcaaacatcaagtgctttgctgagctccgggtgctttttttggataagacacagaaaatacaataagatgtctgtaatgtttgatttttttccaggtttcttgaggtataattgacaaataaaaattgtatggattcaaggtgtacaattcatatacattgatccacatataccttgtttgatgattaatcaaattagttaacacatctttcaccccagcagtcaatgtgtgtgtgctctgttagcaaatttcaattaataatatagcattattaactatagttactatgctgtatattagagtctcaggatttaccatcttataactaaaattttgtagcctttgaccaacatctctcattcctcccacccacagcccctgggaactaccattctactctgcctctatgagttccactttttgtgtttcttttttccctttcctttaattttttttgtatttgttatattaccaaaccatgtcaaaagagttccactttttagattccacatattattagctcgtacagtatttgtctttctgcatctggcttatttcacttaacataatttcctccaggttcattcgtattgttgcaaatggcaagattcccttcttttttatgactgatgatgtctgtctgcaatatttgaaaaaaaaatgcagatcacgtgaatgattgtctaatgtaattctattcatgtaaaattgtgtatgaccataacagtcactcattcattgcttcgagttctttacaatcggatgccatattcctggggctctgctaggcctgaaatggggagtaggagttacaaggttcctgggatatcagtaattcatatttgtgaatgtcttagataagtgggctaacatgtacagaaaatggtcactaaaatgataacactgtttgttataaaatacttttctgtattctcttgaactttttttttttatcatttattagactgcttcagctgccataacaaaatatcacagactggatggattaaacaacaaaaatttatttctcacagttctggaggctgggaagtccaagatcaaggtgtcagcaaggtgggtgtcattctgaggcatcttctcttagcttataggctgaggccattttgcgttgtgctcacgtgacccctttgtgcgcatgtgtggagagagagcatgggtgcttcttcttataaggatgctgaaagttatgagaacccgacccttgtgacttcacttaatcttaattacttccttagaggccccatctccatatacagccacaatggggattagggcttcaacatatgaatttgtggtggggggacgcaaacactcagttcataaacatatgatttttttttccttgatcggcaatgaaaatagaggtatcttcattttggaaagtgagagtcaacctgtgctgaattagagtgatgacaagagatactttaagactgcaatgagggaagcaagggatggggacgcatttgacagtctgttctgctgtgctcctggaagtgagagaggctgagtcgggactaacctttgcacggatgagatagagaactgagagagaaaagtatgtatttttctatgaccacctaaaataaacctggagttgaagggaccagcactctcaacctaaccattctgggaataaaaatcatagagacctcgctgattaatggaaacaatttgcctttcgattttctaagcaggtgaatgcaaggagtttgtgaactttactgctgttttcgtgtttttttaggtgaagacactgacagtaagaaaaggcaaaccacaggtccaagacaaagtggtcaagtcaagaaggaactcaggctgtgtagtcctggtgcaaggctccttgcccccagcgtggggtcacactggctggctgtgctcccacgacacttagtgcatactgggctcctgacttaataacacgtgtttgaaatggcccctgattcccaatctgctgcaggattctgcagatgcgcaacaggccacagtggaaggtcttggagagaattcagagtggcttgcctacgttcccatgaccgtttgtcctaatgggagaatcaccattttggaaaattcttttggaggccaggcgcggtggctcatgcctgtaatttcagcactttgggaggctgaggcaggcagatcacctgaggtcagaagttcgagaccagcctgggcaacatagtgaaaccccatctctactaaaaatacaaaacttagcctggcatggtggtgcacacctgtagtcccagctacccgggaggctgaggcaagagaatcgcttgaacctgggaggcagagattgcagtgagccaagattgcaccactgcactccagtctgggcaacagagtgagactctgtcttaaaaaaaaattcttttggggctagctgtgaatgagctcagagggaaaggcaggagccttcaggtagggagcagcatgattccaccccagattcaggcctcctgggtgtacagagggcaggaggatcctccccaggtatgtgagaggaagggaagatgaggtgtttgggtcagtgaacacactagaaatccaggtgctcactgatggattgtgcttggcatctctgttctgccaatccagcctcaaagcaactttggaagaggatttatgcgcttcacacgcttccagcttgggccagagcatctgcacactcccctgggtataggcctccagggcttggagcaacggaagagctaagaattgtcagtgctcaggaggcagattttcagggaggatcctcttgcatctcaggacatggaaagggctaacagagccttaagtgtcctgtcccagtgctggggtctcagaaggcagctctggggcatctccaccatggtctgacttctgctgcttgaaaccattctccctcacggcacaggcaagagtcctcaaggaagagcacctgggcacctgggttgactcttcctctctccaggtggagagaaccagtagagtttacctggggtcatgctctgagttaatccccctctgcatttctttctcttctcaggggcctgggctcagccttgactcagccttcctcagtgtctgggacttggggtaaacagtcaccatcttctgcactggaagcagcagtgacattgagggttctaaccatatctcttcgtacctacagtgcccaggaactggccccacactcctcatttattatgtccattctcaacccttagggggtcccagcttgattttcagtctctaggtctggcaacacggccttcctggccgtctttggcctctagcctgaagatgggcctgacagtcactgtttgttctgggacaaccatagcatttttacccacatgtgctccaagtccacggggaacagagaccaaatctgccatgagtgaccagtgtcacagggcttcacaccagtcaggcagtcagatggtggtgtttgctttcatttctgctcatcatcccaagggggtggacgcttcaggaatgggaccctatgcaactctcattgctctttataatgatgtgggaaagagaaaccatctcccaggggacttggctttgcaaaaatgaaaataaaagctccctcctccctctgtgcagtgaatggcctctgaatgcagacttggtctccctcttcagtggcaaggttggaggaagaacaacagcttcttattgcactgagacaactcaggggccacctcatttgaagatgtgcatcagtgtgagcccaggtattcctgtactcaatgatcgaggtctctctccttaccttgtctccacctggatctgaccaaagtgactgagatgatccaggttctagttttctcttgctgtgtaacaaatttctgcaaacctagcaccttaaaataacacccatttatgatctcccagttttcctggatcaggagtctgggatcagcttagctgagtcatctgttcagggtcttcccaacctgaaatcagggcattagcttggctgtgttttcatctggaggctcaactgaggaagattctgtttccaaacttactggcagaactcacttccttgctgctatatgactgaagccaaggttttggggggctatttgccgtcagtgcccgaagctcctagagttcctagaggtcacccatagctcttttgccatttaatgtaacctaatgaaaagagagatattccatcacctttgccatatttattggttagaagcaaatcacaggttcttcttgaattcaagtgaagagattgtgcaagggtatgactcatttggggtcaccatagggtacatcctcagtaattgtgtgcagtcaggactaggggaggagattctaattatacagagaagacttgtgccttctattcagaagttaagaagacatcctttactttttaagacactctgtcattttattcattgatttttagtggtgttctagaaagcagattttccaagcgtaaagcacaataatgaaatggcagagctgatgacagttcagatgctattagatgggtgtgcagatctaggtttagagccaagggatggagtagtgtctcttggtctccactgtggagaggccccttgggaaaacccaccacccccatttctcctcactccctgcctggacccatggtctctgcttggtctggcctatgctattaaaaatatacttcaatgatgatacttatgtcttgtgtttctctacactctttgtctatttgcagtggacagcacactgcatgctgatatcaaaaattattccagcaaattcaaaaataagacagtaaaaagaaataaaagacagttttacaatggaagagacagaaatgaatagttgcacttatgtttgatttagctgttaaatctaagagaaccaactgcgaatgagtagagaaagcggtcgttgctgcatactgaccattactagtgtgagatactgggggagctaggatggcctcctcttcctcttccttctcttgcctctcctcttctttcttttttggtaaatatctttcctagatcagcggttctcaaaactttcggtctcatgacctaatcacctcccagaggccctacctccaaataccatcacattaggggttaggtttcaacatatgaattttggggggacacgaatatttagtctagaatgctttttcaagaaaaggaggacagaaagatcatactacagtggcttttaaaaattagatatggacagcttttgtttctggaatatgtcagtgtgctgttgtgcaaagcatcccgggaacaacacctcagaatgtttcctttctgtgcctcagtaagacttgaaggctggtagggtagcctgagtcgtggctttcaatgatattcaggtcctaattcctgggacttgtgaatactgcctgtctttgtccgttttgcattgctgtaaaggaataaccgagtctgggttatttataaagaaaagagttttatttggctcagggttctgcagactgtacaagaagcatggtgcccacatctgtttctggtaaggacctcagaaagctttcaatcttggtggaagggggaggaggcatcacatggcaaaaggcagaacaagagggagaggagaggtgccacattcttttaaacaaccagctctctcatgaatgaactcactgatctccacagggagggcaccaagctattcacgagggatttgcccccatgaccccaaaacttcccaccttctttttctttttcttttttttcttttctttttttttttggagtctcgctctgtcacccaggctggagtgcagtggcgtgatctcagctcactgcaagctccaccttcccggttcacgccattctcccacctccctagtagctgggactacaggcacccgccaccacacccggctaattttgtttttgtatttttagtagagacggggtttcaccgtgttagccaggatcattctttttctttttcttaacctctgggagcacagaacataacataggatttggaggggacaaatatccaagctatatcattactttatatgagaaaaggggttttgcagatgtaattaaggatcttgagggagacattatactggattatgcaatgggccctaaatgtagtcacagatgtcctttcgagagggaggcagggggagatttgaggacagaaaaggagacatgaacagcggtgggatgatgcagctacaagccaagcaatgccagcagtatctagcagctggaagagtcaaggaaacagattctcccctgggacctccagaaggaaccagtcctgctgataattttatttcagttctgtaagccttcttttggattttagattctcagaactgcaagaaaataaattgctgttattctaagcccctaagtttttgacaacttgttgtagcaacaatgggaatctgatatagctaaggtaccatacattttgacatcttctctatatatggtaccattctgatttgtactgtgcaaggcttccttgccctctcactggtaaaccttggtatgcaggaaattatttttgtacattctccagtatattaactttggttataggtgatacattatatctattgcaaattatcattttgtctcctaatttgcatcaaccatgctgcttgtgtctatttatgactgattgtgtaggaaaattcttcaagaaaaaatcaaataggatggtaattcctgcatcttggaatgcctaaaaatcttctggcaataactgattacatagagaaaccatctgtttacttccttcaggaactacctggcaccttctagtgctttcccttgtggaccacaggtgatggaggctgggccctaatccagcacacacctccagtctagcgggcttctggtccagttatttacctacaggtattttattgatgttattcttcctctgatgacacgctgatttcaaaacatgcctaaaaccaaagacacaggatctttgaagtcccttccctcaaatatctgaggcttttccccaattgagcagcagttcacatgcttgtaagttttaaatgtgttaggcattttactggaaatgctttatatgcttcacactccacaggacttcttattcccagctcattgattgaggaaagtgaaatctgccatttgctgatgggccaatgtcaaggccaatgtcccagatcccctgtcaggacaaaagtgtgatgcagccagaagtcagccctcacctgcaaatgctctcctgaacttgcctaccctggagggatctgctcaccaggcagattccaggcgatgcccaaagcactccctaataaaactctgtgtgctcatctccgccttaacttctgtttccaggagacccagcttgtgaccattgtttccaggaagattaccaattgtctctgtttgccctggaccgaaggttttcccaggacatagatctttcagtgctaaaacaggacagtcctgagttatcttaggaccaggaatgtctatgaaaggagacacttgagagatgggattctggagccatggagaccccaatatgggggagttggaggtaggggcgcgagggtagatgcgcatatagcccctaccatggtggagcaatgcagtgtgtaaactttttaccagtggtgaatagggatgatttacctataggaggaaatgaaaaagcaggaccatgagtcagacatttgagagacgtgaagaaaacagaacattaaaggaaccaattccacagctttctctgttggaacagtgtggtagtactgatactaagtgtgattgatgatttgcaacagataaaatgctggaatgattaattagcaatgaaaaactagaagatgtggggcaacaaggctccagctccatcctcttagggtaccagctgggctcaagaattgacataaaacagattcgcaggagacaaaacatacaaatttacttaatacaagtttcacatggcacaggagccctcacaaggaaatgaagacccaaagaagcagttagagtcagttacttatataaggaattggtcaaagaatagtcagttgtgaagaaacgactaaaatatgtggggaaaaaagccccagaatctggtgtatccaaataggactccactctgatgacaggtttcttgggctgagattcctttgagccccatccaacttcttcccagctgctgagaagagaaaatcttttagaggcttcctggaattttcccagtccacactgattttgcttaaaagataaaagttattataataaggtctgttcagcagtatctcagttttgacttctcatccctgaggataagaatgttgcttttccttctagcatagggagggacagggtttttcacatgggacttttgtcttctgcttttaagaaacagaaaacagcagaatgatctttttgcaactggtgttttcaagtgccttttacttaaatagtcaatttgctagaccggtacttttttatttcttttcttttttttttattatactttaagttttagggtacatgtgcacaacatgcaggttagttacatatgtatacatgtgccatgttggtgtgctgcacccatcaactcgtcatttaacaccaggtatatctcctaatgctatccctcccccctccccccacaacaggccccagtgtgtgatgttcccccactgtgtccatgtgttctcattgttcaattcccacctatgagtgagaacatgcggtgtttggtttttcgtccttgtgacagtttgctgagaatgatggtttccagcttcatccatgtccctacaaaggacatgaactcatcaatttttatggctgcatagtgttccatggtgtatatgtgccacattttgttaatccatagactggtacatttttaactccatcagagcgcaagccaaaaagcttcctcctgggctgaaaaaaaaagcttccccctgggctgaaaaaaagcttcatcttgggctggaaaagctttttggcttgcactcttcctctgggcctgagccttccctgccctctcatctgcttggacagagggcagggaagactgaagcccagaacttaatcctaagtgtagcagaccatcgggaccctgacagggtaacagtggggtactgagtcacgggacgaggccatctggattcacgcacctgaaaatcttgatgtccttgaattttccaaacctgcagaagtggccctcccttactcattgaaacccatgtctcccttccttttgcctgaagatgatgcagagacctctgacctgtgagattgtatccaccaccacaagtgtccccagaaatctgccaccacctcctattaagaccaaaggaccaataactagaattgagtcccaaagaaacctggcaaggaatgtgatagacctgctgcagaactaaggagctgcagaactaaggagctccagaaccagccaacacgtgcagtgggccccaggcgagtgtgtatggggctggattctgagggtgtaagatcaaagtgcaaaacctaagattggattggggagggtttatctgctggaagcactctcctgggacgcaggctttaaccccctagcaaagacattgaggcattctgcaagcccgccgcaaggattgcccttaggaggacagagaaagcaatggtccgtaccaagcaaggtcataatgccagatgtgctgtggcagatggtgggagaggaatcaaaaggtcctgggaggccaggtgtggtggcttatgcctgtaatcccggcaccttgggaggccactgtgggagaatggcttgaggctaggagatcaagaccagcctgggcaatatagtgagaccctttctgtacaaaagattaaaaaaaattagtcaggcatggtggcacactcctgtagtcccagctactagggagtctgaggtaggaggattgcttcagcctggggagtttaagactgtagccagctgttccagcctgggcgacagagtgagaccctgaaaaaaagaaagaaagagagagaaagagagagagagagaaagaaagagagagatggagagaaagaaaggaaggaaggaaggggaagggaagggaggaagggaaggaaggagagaaagaaaaaagaaaagaaagaaagagagagggagaaagagagaaaggaaggaagggagagagagagggaaagaaggaaagaaaagaaaagaaagaaagagagagagagagagaagggttctgagagtgcttagctggaaaggcaataccaggtactcatggacatctccccaagtgagagaattctcaggagggcctggggactgcagtctgtaattgattgataagcggtgcactggtgagagaaatccagcatccttgagaaactcagtgggtagttctctagaccaggccagcaggggaagctggtaaggaagttgatagcaatacggatggaaggaccatgcagtgatagtgtcacattgtcagggcttaagcataggagccaggtgtgtggcaaaagatgaagtggcagcaaggcacctgacattgaatgatggagtcagtcagtatagcatggcacctctcggggcaagatgcataagccaccaagaaagggacagcttctaatctttttagcttattttttatttttttgttgagatgggggggtctcactaggttatccagagtagtctcgaactcctggcctcaagtgatcctcctgcctcagcctcccaaattgctgggattacaggtatgagccatagcttccggcctagcttttaatctatattttcagagggaagtaaggaagaagggtcaaaccccattaacaagtttctgaaagagcctaacttgcaatgtctagtcattccagagtaggatatttaccccaaggattaattcactgtagttgctgtgataaatgaccaaaccataaactgagtgactaaaaacaaagacctctaaatgattacacctggtatctttggaggagccattcaatctactatacgctgcttccaagtccttgtagaaaaacatacggaaatcatgcatcatcccatgggtggaagacctcgctccaggttagtgaactgctctgatttgtgactccaaagatggacattggtgacagcaaaaggaggacccagaatctcgtgtattcaaacagaactccactctcatgagaggtccttggatctagacccttgggtcaagcttcctctgagcattgtccaacatcttcccacttgctgagaaggaagattctttatgtgggccctggaatagcctcagtccagcctgatctctctctcttccctcctgaagttttatttcaaacattttgagactctaaaagggtttctttgtctcatttctctcctccagtcctactaccagggttgtcttcaatttatatccaatgtttctctggcctggaactgagacctacctcccaagcagcgacccgacccgtggagtggggtccctggggcaagcgaatggtcctttgcctggagaacctgggccagcagtcatggcaggtgacacattccattctggggcgaggaaccagggagggagcactgcatagatcagaagggtaaacaaggggagggagaaggagcaaacttagatttgggagggaaagagggaagggtgcagaggaagcagaacacggatgactgggcctccttcagttgttcttgtgactagaccctcccatctaagccaccaggggacaggaagggtatgagtttgaggactctaatggccccaaggtactactgtggtttatcctacttgtaggcggtcccaagagctttgttctctccagggactcaaaggggatgaacttgcaagtcttttgtctccactcagtgccttctctgattaggccaataaacatccccaggcctcagtctcaggccactgtaggggctgaggacagtgagaaagatgtgtgagcatccaccctttggagaggttgagtaggaatgagaggtcccctgccttgcctttggtccttgtgaaggaagatgttggatatttcccagcttggctggaatccgttcctcaccctccccattcagagcagggatgagtaagtcctccgctttctccgcaaccacaattgtgtttttcaggaaaggataaagtgggaaagatcagatcccatgcctcttcctcctctaagtcatgggatgactgcagagagtgagcaagagggtaaaaacagtgcactgagtgtgatgtttgctaaaggaacagataattgcatcaaaacctatttctagcagagttgtggtgcttgcctataatcccagctactaaggaggctgaggctggaggattgtgaggccgggagctcaagaccagcatgggtagcatagtgagagctcatctctaaaaaacaaaacaaaaaaccacacttatttctaattgtctaattggtatccactatcagacctttctgggaagttttttttctaacatgcctaaatgtggcttggagactgtttgggtgaggccaatagcttagccttcctacttaagttgtctccttcattcattcaacaagcaggtattattgagtggattgttgggtgcatttgtgtgtcctcagtaggatgcaggcatgcaatacatgaagatatgataattccagtcagaggaatggcctgtgcaaaggccctgaggtagagagaaccttgataattgaaagaacagaaagaaatccagtgggactggggaaagagaggaaggagatgagaggggagttacaggcagccaacagatcatgtgcagacagatcacttgaaagcagaggcaaatggctggatgtttttgttaatgaaaagagaatttatttgaagatcttccatcatttttacatgaagtgattgatgtgttaaatgaatgaaatttaacattcatggtgtatgaaatttatggaagaaaaactgaagcaggcagagcattttatggcctttgggcacaagagagtgaagcttgtcccatgtagagtcatggagagtgactgggagattcaccattagagttggcagattggctcttggattgaatatggggcatgaagcaaagagttgttgactcctggaagtttgactttgtcaatggcgtggctactactttcttttattaagagagagacagatgggagagcaacaggtttgagggaaacacataaagtgctttgtttggactcatggggattttttggagaagacagacaagatacaagtaacaagatgatgatgtctgtaatatttgggtacaaaatgcaattcataaacctgattgtataatatgatcctatttatgtaaaatcatatatatttagttaccttgattcaatttatacatcactaattgtttccagtaatattaaccaaaggtctactatatgccaaataaccttttatggctagagatagaaaaatgaacaaaacttactatgttcatccttatggaagatacataattcatatttgtaaacatcacatttaagtatggcaagaaatctggtgggatggttcctaaaatgaaacaatagtttcataggtttgtgagaatttaggtgatatttctacttaactttcatgtacactaaaaatttttcctataactcaaaaaaattttttggaggcagattagcaagatatttattttggaaaagcaagagtcaatctgaattgaactggagggatgctgagagttctagaacttcatagagagaaagaaaactgagttattgggtgggggttacacctatctttttgtcttttcttttctttctttcttttttttgagacagggtctccctctctcactcaggctgaagtgcagtggtatgatcttggctcactgcaacctctgcctccctagtagctgggaccaccacaggcatgcaccaccatgtccggctaatttttaaaatttttttggtagagacagagttttgccatgttgcccaggctggtctcagactcctggactcaagagatccgcccaccttggcctcccaaagtgctgggattacaggcgtgaaccactgcgttgggccgcttatcactttaatgtctaatgagaggcccctggagctggaacccttagccccagcctgacccctgacccttctcccatgtcctcaaattcaaaaactcacctctggctgtccattcagttgttctcaagtctgactgtgctctttgtccttcatgaactagaactagtctttctttcaaaccattttgatgagctgatcaatgtctcctcataccatttttctcattcagccttcctcctggggttggttttatttaccatctaacaatatttctgtaaccctgagcctctagagctgcctcaggtgcactaacgctgtgactaggctgccctgggacaagctaagaggttctgcgggggagggtctgggcccctggtgtggcagaaggtgcatccatcctggaggaagccagaggaccaagggccaggagcctgggggggattagaagggaccaggaggcctggtcctgagctgggatgggaaggaacgggaaggggcaggagcaggacagggatttccagatccactcagccgcctccctggggcttgggctcctccatctgaggccaccagggggcggcaagggcttggatttggggaagggaattgctgtggtttaaccagggagtgtatgaagctccatgggctgcttcctcctgagacccttctaagggagaagtggggagtggaatgtccaaaatatgttgtgtcccaatatgttcgtttctagaaaggctaataaatagcctcagcccccagcctcagagcactgcatagaaagaggacagaggtatttgagggtcattctgagagaacctagaaggtattgagtgggaataaacagtccccagctctgcctttggtccctgggaaacagagtgcctggatcactccacagtggtcatctgggatctggtccgaggtctcttccttgattctgttccctgagccttttttattctattttggatcagatccatgcacacgtagctcagagttgtgcccaagatttcataaggaatttacagggttttttccccctcaaacttatttctctccacagtctgcccattatttatggttccccagactttcccttttggtcttctggtgaaaaaactgtgactttaataagcctgcggtgctgtgcacttcctgcaactgagtccgtgtccacaccaaacaccaagaggacaaagagtaacaaaggtaaggggattaagtgccactgtcttggaaatcagctccaaagatgagaaaagaaagtccgcacagtctctactgtccctgctgtcaccacgaagaatttcctggaggctggatcatgtagaatggagagaagaacaaacataagaaaaggaaaacgtggacatttcaaatttgccctgagcactaggggtttcctttctcatcttcaagccagaacagtggagcttcttctggaacttttgtggctgcacactggtaccccttccaggtattggtctgccctgagtgcaggccacaggacactgggggaaaatgggaagctctctgctggtttgattttactaaaagtgctagtatctcccctagtctgcctccagtgatttgcttttccaagtaatcaaattgatgctccatggattctgtcccaggttttacagctgggcttggagaaaatgtggtatatgccactgcatccgaaatggaacctgaaaacagtaataatattctaaacgtgaaaattaaatcaatctgaatcacaggcagtggaaaacatcaaaagatgaaagagttttaaaagtgatttgaggaaagaaacagggagaaatattttcacattggttctatgtttactctatttatcttttttaatttaattttaaaaatagagatgaggaggtctcactatgttgcccagccaggctggtctcgaactcctgggctcaagcaattcacccgcctcagcctcccaaggtgatggattacaggcatgagccaccacacccggcccctgtgtttcttatgtgctccttgattaagaagagttgttttttgtttttgtttttgttttttgttttcttgagatggagtttcacttttgttgcccaggctggagtgcaatggtgcaatctcggctcactacaacctctgcctcccaggttcaagcgattctcctgcctcagcctcccaagtagctggattacaggcgtgcaccactacaccagctaattttttgtattcagtagagacggggtttcaccatcttggtcaggctggtctgaaactcttgacttcaggtgatccacctacctcggcctcccaaagtgctgtgattacaggggtgagccaccatgcccggccaaaaagttggtttattgtagcttgtggatacagtgagatggaagaaaacccagaaagcagaaataacacttctttgtaatatgaggaaaaaaataaaagataaagttgaatgaaatatttcatatatatatgtttcatatacatgtttcttatatatgtttcatatacatgtttcatatatatgtttcatatacatttcatatatatgtttcatatacatttcatatatatgtttcatatacatttcatatatatgtttcatatacatttcatatatatgtttcatatatatattgcaacatatatatgcaatattcatatatatagccatatatatgtttcatatatatattgcatatatatgtttcatatatgtttcatacatatgtttcatatatatatagttttttacagagtcttgctctcttgctctgtcacccaggctggagtgcagtggcctaatcttggctcactgcaacctctgcctcccgggttccagtgattctcctgcctcagtctcccgagtagctgggattacaggaacgcaccaccatgcctggctaatttttgtatttttagtaaaagtggagttttgccatgttggccagtctggtcttgaactcctgccctcaagcgatcctcctgcctcagtgtcccaaactgctgggataacaggcgtgagctatcacgctcggtctgaaatctttagataagtatgaagtctatataaaaaaaaaaggctcttactaggctagaaatggcccattttagaagctttcattttccacctcacactcatctctctatagatcctctgcttgggcagtgggtggaccttgtggtcctcagttctcaggctgagaaccagaggctgaaaaggacaagtcacctgctcatgagtgggaagggcaggattgggagcagcggactgtggctccattgctccttgtttcctccacaggcccctcccacgtgtgcccctgaatgacctagaatgactaatgtgctcaagggatttgatgctgcagatgcttcggcatgaagggtgggggtggggatgggacaaggctgcagctgaagagatgggagaccaacaacacacagcaggggtttccatggggtgggcacccccatttcctcacagtttagagagcctggaggtgggtgccaagcagagggcaccatggcgtggcccaggcctggaggttcacagagacacaggcacaacacagcagagacactgagggccaggagctcactcagatgagggacttcagcagatctttctctcttgaggaaattaggtacaaaggaatcaagttcctaccatcagaatagacaacaagttttaatctcctcagctgagccccgctgtcgagggaagcagaagtctctgagcccggcccaggtgagagtggggtgaggagaggagctcagggtgcagatttgcatgaaggccccaccctcctctgaggcagaggggataagacaagtctgggggtaggcccagcgctggggtctcaggaggcagcgctctctcgggacgtctccaccatggcctgggctctgctccttctcaccctcctcactcagggcacaggtgacgcctccagggaaggggccttggggacctctgggctgatctttggtctcctgctcctcagactcacctgggcccagcactgactcaccagagtgtatttctccctctttccagggtcctgggcccagtctgttctgactcagcctcgctcagtgtccaggtctcctggacagtaggttactatcttctgcactggaaccagcagtgacattgggggttatgaccttgtctcctggtgccagtagcacccaggcaaagcccccaaactcatgatttatgatgtcgctaattggccctcaggggcccctggttgcttctctggctccaagtctggcaacacggcctccctgaccatctctgggctccaggctgaggacgaggctgattattactgcagctcatatgcaggcagctacaatttccacagtggtccaagttcatgcgtaatgagaccaaaacctgccctggtctctcaggctctctctcgctatgaaggtgcttccttaccctgtgcagaagagggtttcatgcaacatggccttgagaatttcatccactctcagcccctctcccctccaacaatgaaatgcaaaagaaacatgctctctggttaattgtctagggacaatggcagcttcttcttttcctgtgtgatatggtcctgcatggtgactctttccaacttttcaatggcagggacagagcaataggatccatctgctcagtaccatttctgcagttttctatgaaaccctcacattaaatgcctccatctcccacactgtgctgactggcctgggtctgtgctccagaaataacgtcttactcaactccatatccaccacgctgtagtaaggatggctgtctttgctgggttatttgttcctctgcaggtctcttcccaaagcaacaccaactgagagaagatctgaagatgttgagagagtgagcataaaagtaaagggttttatttatttgctttcttttttttttaactttgtttttatttatttttttgatacagagttttgctcttgttgcccaggctggagtgcaatggtgcaatctcagctcactgcaccctctgcctcccgggttcaagcgattctcctgcctcagcctcctgagtagctgggactacaggcacgcgccaccatgcccagctaatgtagagatggggtttcaccatgttggcctggctggtcttgaactcctggcctcaggtgatctgcccacctcagcctcccgaagtgctggcattacagacatgagctaccatgcctggccttgtttttattttttagagttcctttgtctttgacccgatgtctatctatgggggcttagccagggcacatttgagtgattgttctttgcgagaacattgttctttgcagatcattaaacccctgtcctggaaacagtcctgtacttagactgtctccctgttagcatgggctctttcctaaatgatccacaggaaagcttatttggtggatgggtcttctgttcctcaaggactctatgggtagtttattttcaaggtgagccaatactgtttctagctggaatctcatttaatctcataaccatgagaattaattttttaaacctgcagggtgttctctagccattttttaattttctttgattttgtgagccacttttaaattataatcatcattaaaccttaaaacatataaacttcaattaagcagattatatattttattttattttttgagacagagtctcggtctgttgcccaggctggagtgcagtggcacaatcttggctcgctgcaaactctgactcccgggttcaagtgattttcgtgcctcagcctcccgagtagctggaattacaggcatgtgccatcacgcctagctaatttttgcatttttagtagagacggggtttcaccgtgttggccaggctggtctcgaacttctgacctcgtgatccacccgcctcggtctcccgaagtgctgggattacaggcatgagccatcaagaccagccacatatttttaaaaagtacattggttattatccacatacctttggactgctataacacaataccttaaactggtggcttataaaaacagaaatgtatttcttacactcgtggaggctgggaagtcttaagatcaatgtgctggcagatttggtgtctaatgactgtctgcttcctcatagaggccattttctcactgtgtccttggaactgaggacaaagcagctcctggtaaagttcagatgtctgtttcttgcaggaaaatttctctttacagtgatctgggctactggctccaacacacgcacccagatggatttctgagccggtcattgaccattaccattttaatattatctcaaattataaacattatctcaactattgtttaatataatatagcacataaatgtttaaagcatacatagcgaaacaagggtcttacattcaaaactgtcatttccccaatcacccatctccttgtccaccaagccccagtgccaccacttagctcattgctcctttggcttcactttctggtgctcttgcaagtgtctgtcatgtgttacaaacaacaacaaatagtcctccaagaacgtttacctccatagaatccctatcctgtttcctgagtggacatttccatttttaatctggcaaagatcagtcagccctgattagtgttttaaactcatatccatctctttctagaaaaacacactaggttaagcatctctctgtggatgggggaccctcatgaaggcacacagctctgagctgaggtggcctcaatgtgtacaatggagcaagacaaagaaaagtcccatgttctgtgtgatagacagacaggcactgatgagaggtctccagagctggcgcccttagtctaatcttgactctagtcctcgtctttccgacccttaaacactagaattcctggtctgcattccattaggtcattcttaaatctagtgagctgtatctccttcatgcaatgtttttctttcactattattttcagctttattgacatataattgacaaataaaaattctatatatttatggtatacaacttgatatattaatacatttgttgtacattgatatatttgttgtgaaattactgcaataattgtgtgaaatcacaatcaatctaattcacataaaataaccttacataattatcatcttctttcttttttttttttttttggtgagaacacttacaatctaccaaattagcaaatttaaagtaaataatgcaatattgttaaccatagtcacattgcggtacattagctatctagaacttattcatcttgtatcactgtactcttttataccctttgataaacatctccccatttcccttttccctccccagtcctgacacccaccattttactctctggttctatgagtttgaatattttagattctacatgcaaataagatcatgcagtatttgcctttctgtttctggcttatatcagttaacataatgtcctccagctttatccatgttgttgcaaatgatgggatttcctttattttttaaaacttggcaatatttgtgtgtgtgtatgtgtgtgtatgtatgtatgtatgtgtgtgcatgcaccacattttctttatccattcatttgtcatcagaaatttaggttgtttccatgtgttggctattgtgaataatgttgcaaaagacatgggagaacagatatctattcaagattctgatttcattttgttttgagatatgcccagaattggtattgctggattatatggtagttctatttttaattttttaaggaatccccatacattttctacaatggctgtttagtttacattcctttcaacagtgtacaagagtttcttttgtccacatccttgccaacatttgttatcgtttatctttttgataaattacaggcacgtgccaacacacctggctaattttttatatttttggtagagacggggtttcaccatgttggccaggctggtttagaactcctgacctcaagtgatccactgcctcggcctctcaaagtgccgggattacaggtgtgagccaccatgcctggcctattttttctatttctataaagaatgacatttgtgtattgataggtctagcattgaatctggagatcactttaggtagtatgaacatttaagaatattagttcttccaatttataaacacgagatgtcttgatatttatctgtatcttctttaacattcttcatcactgttttataatttccagtgtaaaactctttcacctccttcgttaagtttattcctaagtactaattccttttgtaaatgtgattgctttcttaattttattttcatatatttactgtctgtgtgtagaaacgtcatcaatttttgtatgttgatttttttatccttcaaatttacttaatttagttttaacagactttttgttattgtggagtctttaggtttttctacacttatgtttatgtcatctgcacacaaagattaggattttaatccttcttttccaatttggatgcgtttcatttctttttcttgtcgaatttctctggttagggattccagtgcaatgttgaattaaaataagtggagagggggcatcttgccttgtgtgggatcttaggggaaaagcttctgtttttttcccattgattatgatgttagttgtgggcttttcacatatggtttttattgtgttgtggtaagtttcttctgtacctatttcattttatttttgtttttttaaatatttattttataatagagattaattttgctatgttgcccaggctggtcttgaactcttgggctcaagcgatcctcctgccttagcctctcaaaatactgggactacaggcatgagccactgtgcccggcctatcactattttgttgagagttcttttcttttcttttccttttttttccattgctttcttttcttttcctttccttttttcctttccttccttttcttttcctttcttttctcctcctcctcctcttcctcttcttttttctttcctcctcctcctccttcttcatcttcatttaaaatcatgaatggatgttgaatttggccacatgccttttgtacatctgtggacataatcatatgtgtgtgtgtgtgtgtgtgtgaatctttcagcctgtggatgcgctataccatccttgcacatgcggaatcatccttttatccagggataaaccccacctgttcctgatgtatgatcttcttaacatactgttgaatttggtttgctagtattttactgagaatttttgcatttaatatctgttaatgtttatcagaggtagactggcttgcagttttttttcttttctggtgttgtctttgctttgttttggtatcagggtgatcccgacctcataaaacaattttggaagtgttcccttttctattttttggaagactttaagaagaattaatattaactcatctttgaatgtttggtagaacattcagctatgaagccatctggtcctgggcttttctttgttgagatatttttgattattgagtcaatctccttctttgttattggtatgttcaggctttgtattttttattgatttgcttttttttttaagttgactgtttctaggaatttatttatgtcttttaatttatctagcttggtgtataatttttcaaaatagtcccttatgatcctatttatttatttgagacagggtctttctctgtcacccaggctagagtggagaggcttgaccacagctcactgcagccacaacctcccaggctcaagtaatcctcccacctcagctttctgagtagctgggactacaggcatgcaccaccatgcctggataatttctttttctttctttctttcctttctttcctttctttcctttctttcctttctttcctttctttcctttctttcctttctttcctttctttcctttcctttctttctttctttctttctttctttctttctttctttctttctttctttctttctttctttctttctttctttctttctttctttctttctttctttctttctttcttttcttcttttttttgtatagatgtgacctcactgtgttgcccaggctggtcttgaattcctgggctccagagatccacctgcctcggtctcccaagtgttgggattacaggtgtgagcctttttatttctgagaaatctgttgtaatagctccttttttcattttggattttatttgagtcttctctcttttttcacagtgtagctaaggatttgtcaacttcgtttaatttttcagaaaaccatctcttagttttgtttttttctattatctgtttgatttatttctgctgtaatctttattatttcatttttttctgctaagtttgggcttagtttgttcctctttttctagttcgttgagttataattttaggttgcttatttgagatctttcttcttttttaatgtttgcttatctccataaacttcccacttagcactgcttttactgcatcctataggtttggtgtgctgtgttttaattttcatttgaagatatttttaaaattccctttggttttcctctttgacccaatgcttgttcaacatgtgatgtttgatttctgcctatttgtgaatttttccatttttttttactgttattaatttccagattcatttcttgttgtaaaaaaagatttttggaatgatttaattctccttacatttcttaagacttgttttgtgaccaaacatgagctctctcctggagaatataccctgtgcatgtaagaagacattttgagaacccaggtggtcttttctcataccatttttctcacccagtgctcatactgaggttagttcattttacatctaacattttctcagcctggagctaagacacctcatgtacctttgacaaagccattctagcacaagcaaaacggtcctgagaacgagtatcttagccacctggtatggcagaggacacattcatcatggaaaaagtctgaggaaaagggtcaagattagcatggatcgagggtctggtcctgagctgggaggagaaaaaggcaggttggagtgggaccaaaccaggtatttctatctctcacttagaattgtgtcttggtacttgagatgaaccatctgaggccaccagggggcagcaggggactaggttggagaagatgattgataaagtttatcctgacctttaagaagcccctgagtcggccgggcgcggtggctcacacctgtaatcccagcactttgggagactgaggagggtggatcataaggtcagaagatcgagaccatcctggccaacgtggtgaaaccccgtctctactaaaaatacaaaaattagctgggcgtggtggcttatgcctgtaatctcagctagtcgcgaacctgaggcaggagaactgcttgaaccagggagttggaggttgcagtgagccgagatggcgccaccgtgttccagcctggtgacagcgcgagactccatctcaaaaaaaaaaaagtccctgaatctcaaaaaaaagaatgtgactttatgattaactatgaacagctgctcattaataaaaagccattaaaaaaaaaaaagaaatcccaagagctacttacccttgaatatctctaaaggtactgggaagcagtgctccaaatctgttgtggcccagtgaattcctttttagaagcaccattaatggtcctagttcaacatgtcaggccccagctttaaaccactgcaggggcaggggatgtagcagtgcttagaacccaccttagctgagaggaccaagatggttgggcaggggatgagggaaatgagaagttccagcactgtctgaagtctctgggaggaggagtgattgaactttcccacccggcctgggagcagcctgtcctcacattcatccctcacagcacaaaggagaagtcctggtttcctcagcctggagctcctgcaatagtgagggttaggatatctctggactggcctgatgtcctgggcactctcatgggttcagtctcaggaaatccatgcctaggctggattaataccctcagctgagcctcacagggaagcagaagtctctgagcccaggcccaggtgagggtggggtgaggagaggagctcaggacacagatttgcatggaggccctgccctcctctgaggcggggggataagacagggctagaggcaggcccggtgctggggtctcaaggcagcgctctcgggacatctccaccatggcctgggctctgctcctcctcaccctcctcactcagggcacaggtgacacctccagggaaatggccttggggacctctgagctaatgcttggtcttctgctcctgctcctcagggtcactggacccagtactgacccagtagagtgtgtttctccctctttccagggtcctgggcccaatctgccctgactcagcctccttttgtgtccggggctcctggacagtcggtcaccatctcctgcactggaaccagcagtgacgttggggattatgatcatgtcttctggtaccaaaagcgtctcagcactacctccagactcctgatttacaatgtcaatactcggccttcagggatctctgacctcttctcaggctccaagtctggcaacatggcttccctgaccatctctgggctcaagtccgaggttgaggctaattatcactgcagcttatattcaagtagttacactttccatagtggtccaagttcctagggaactgagaccaaaacctgccctgggctctcaggctctgtctttgctctgaagatgcttcctcaccctgtgccaggggcttcctgcaacagggccttgagaattcacttctctgtcagctcctctccttttccatcaattcccaaaggaaacctcctctcttgtttactctccgggatatgacagcttcttcttcactcgtatgacggatgtcctctctgaattggaaactacttctagctctttaacaggaagtacataccggcagggaaatgcctgcctagtgcagtccccatacttctccggatgatcctcactttattatttatttttatttttgtatgcactaaagtcgtcaatgtaaatccttacgtcgaatgcctccacttcccacattgtgtagcacagcctggattcagttcttcagaaatgacgtcctcttcaatgataaaggaccactgctctgtgaacaccccactctagtgaagatagcccaccttgctgggttattcatgtacatcttttgtggaagcagtaaccactgtgtaaagctccaaagatgttttaaagcaatgaaaacaaagaggaagaagtgtgtgtgtgtgtgtgtgtgtgtgtgtgtgtgtgtgtgtgtgtagggtccatcctgtttgccctaatatctcaggttgccgagctagggagtatttgagtgacagacttggtgccctctcaggatcctcctcctctcacatcactgagtccctgtcctggaaacaccctacaggtggacaatctccccatagtatggaagtttccaaaatggctccacagggaagagttgagctgaacacacccactctttctcatgggcatcaaatatatctaatttttctggggaaatcatcaatttctagctggaatcctgattaatcgacagactgtgagaattaaaaattttaaaaatattcagacatatccagagtccagtatttaaattctctggaattttgtgagccaatctttaaacatagttattattgtagtttagagttcatgaacctgaattaaatagattctagtaaacataaagtgccttagttgtctattgttgcataaaaattactcctaaaattaacatattcttaatgagaacacatatgcattaatctgttttcgcactgctataaagaaataccttatttataaaagaaagaggtttaactggctcacagttccacatggctggggaggcctcaggaaacttacaatcatggtagaaggcaaaggagaagcaagaactttgttcacaaggtggcaggtgagaagagctggggagggtgaacttccaaatacttttttttttgagatggagtctcactctgttgcccaggctagagtgcagtggcgtgctctcggctcactgcagcttctgcctcccaggttcaagtgatcctcctacctcagtctccgagtagctgttattacaggcatgcgtcaccaagaccgactaatttttatatttttagtagagatggggttttaccatgttgaccaggctggtctcgaactcctgacctcaagtgatttgcacacctaggcctcccaaggtgctgggattacaggcgcaagccattgtgcctggccccagacacttttaaaaccatcagctctcatggtaactccctacccatcacgagaacagcaaggggaaaactgcccccatgatccaatcccttccgtccctcaacatatggggattacaagtccctccttcaacacatggggattacaatttgagaagagatttgggtggagacacagagccaaaccatattaatgtatttgtgatcttgtagttttcttgcatcaagaatctgagagctgcttagtttggtggttctgactctgggctcctcatgaaattgcagccaagctgtcaggcggggctgcattcagaggccagagcaggtggccaggcccagcctgagggggcttctactgtccctaacctctttggcagatgtagatgaagtcagggaaaaggggagctccccacagtgggtagcatcccagtgtcagagggaaggcaccatggagcagtgggaccagcacaggaccctgggggtgcactcagacctacctggagggatggcaagaaggggcattcacagcagggacaggataaagggcctctgccccatgtccagagctgtcttggcagctcagtcacattggttatcaggtaaatcggaggtaaaccctatcctgagttttaccactgaaaatgggtacaatttgaactaggagtgttttcagactttttctttccatattgacttcttaataaccgcgatttaattttttttaaccccagcctagtttagctacatagcttccaaatgtcatgctactgtgaaactgagcaattagttacttttatcagagcattttaaatttgaacaggttccttggtctttctatgtgtaattagtcaaagcttaggtatggagtagaggatctttaccaaatgcttttctagactctgttttcattggacttatagcagctgtttcacctgggccatgcaggaataggagagttgttgctccttgacatagcatctgtaacatgcctatcctttctgccactataaaaatagctgtgctttctctccactcgtctctcctgctgtttccctgtttttcctattaaatatgcagtgtttgcaatccatcttgcattctgagaagatgaggattttttttcataaagaatgacctaaaatagctctaaagatcatcagaagtcacaactacatacttactggagtgcaataccaaatgtggcctctgattacagtaacctggagcttgcagtttaagcaattcagtccctgtcacttgtggacagattcgtatgtctgtggatgagaagatgagcaacggtcactcctgtgctcatgcacagatccctccctgcccctgtcctcaaattcagactgaagtgcatggccctggagcattacatgagtgatggtttaagagcacgttggtgatacacacaatattaatggtatcttaatttgcttgttaagcataatttgaaaacatctggacaaatttggacacaatttgaagggcatatttgataatagcttgtgacaaatgattccgttctgggagagatgctatttttggttctctaaatcgccatgaaatgaaaatctcagattataaagaaatagactcaaatcccaagtgtcttttgcttttcattccccatcaactgtgttgcccaagcaccatgtggacactgcttacagggtaggcagccaccagctgaaggcaggttctttagttgtctgagctgtcctggagctgggaacagcagcgtgtgttctgtgcctgttggtccctatgtagcacacacccactgcatattctcgctgactcaccaggagggcttgcagcagccctggcctattttcttctgaagcacctgccaatggtgcattctcccctggtcataatgcaccaggagataaacatggcatttgacacacaggtgctaactggatctaggacttctaagcttaagtagactcagagtgggcaatctaaaaaaaaaaaaaaaaataggttctcaatcggtagcccaggctggagtgcagtggctccatctcctacctcagcctcctgagttgctgggacaacaggtgtgtgccaccatgcccagccaacagagagggcaatatggacttgaaatggacaatttccattacttgaaagtttttgagaaagaactgaggtttgtttaagaggaaatcagccagagactcaaagttaaatctatcaggcccaaagtctctttggggaaaggagactcttggacgtgcacgcagcagcaagtggtatgggatcccttctctgtggggaccttggcccaactgccaatcttttcaactgacccatttgcgttttccataagtgctcgccagccagcagctgtgactgcccctcagtctcaggaagggagaaagaaggaaacaggagcaaagcctctttcaatcttagcaaataaagtgggagctttgacttttttgaacacccagatgacaggaaagaggaggaaaattttcctaaagctgttattttttaatgcctcaggaagaatcacacccggagtctcatccacactttatttggaggtatttgggtctcagagtttgtgctgagttagttaatgatttgggctactgggatggggtgaatgtgttttacaagtgagaaagaaataagctttggagtccacagggtggaggcttattggctaaattgtgtccctcaagattcatgcaatgaagccttaatcacagtgtgtgactaaatttggagacagggtctttatggaggtgattaagtgaaaatgaggtcatgagggtgggttcttatccagtctgactggtgttctccttagaagagaaaatttgcacacacagaaatcagacaccagagatgagcaggcggaggaaagaccatgtgaggtcacagcaaggaggtaacgacctgcaagccaaggagagaggcctcagggaaaatcagtcctaccaacactttcaccctggactttccagcttcagcactgagaaaataagttttgctgttgaggccactagttctttggtatcttgtgatggcagcactggcaaatgaaaacaagagggaccccaaagaccttgggtagggggaacagatggagcagggtgcaggaggcagggcagggaggggctggaaggtcatgctctgaggttcgtttcctggatggaactgggactccactcactactgtctggggaacttggggaaaaaacttcacctcccaatattgattccctaataaaatctgggccctgagcatagggctcctcatcttcctactccatatgatgcaagttttcttgaagttatgcttgtaaaacactcaccaatgcatctggcatatattaagggctcaaaagtaggccaggcatggtggcttatgcctgtaatcccaatactttgggaggccgaggtgggggatcactggagtccaggagttccagaccagccaggccaacatggtgaaactccatctctactaaaaatacaaaaaaaaaaaaaaatagctaggcatggtggtgcccttctgtaatctcagctattcaggaggctgaggcaggggaatagcttgagcctgagaggcggaggttgcggtgagcccagatggtgccattgcactccagcctagatgatagagtgagactccatcacaaaaaggaaaaaaaaaaggttgtcattctgcagcccagatcgtgccattgcactccagcctggacgatagagtgagactccaccacacacacacacaaacgcacacacacacaaaaactaacccccgccccgcaaaaatcgaaggtagccattctgctgtatgatctattgatacatacaggatgacatttgtcctgtgggcaccagggggcactgtgacccctggtttgggacactaatggctccaagtccctggtagtacttgagtcatttcctttctggccccttctattgagtggaatcctgaaacccacctgactcttctactcttgaaaaattacgcagagaatgtcctcagacatagggtcagacaagaacttcgacatacattttaaagaatggagagcagatttacatccgctgcttaacagggaaccaactaacaaagaattaagaataaaggaagtagagttgcatgaagagactcccctttctatgataagaaaggcctgaaggtcccttcccagctgtggactcagaggcagagctctggggcatttccattatggcctggacccctcccctgctcgtcctcactctctgcacaggtgctgcctcccagggctcagcccccagtgggatcaagatcagcctggccctgaccttcaactcaacatagggagtgatgcagggtgtggggttctgggaatgaggccctcatcctcagactcacctctcctgtcctctcttgtgggctccgttatttcctctgggccaactcaggtgcctgcagtgtctgtggccttgggacaaatggccaggatcacctgccagggagacagcatggaaggctcttatgaacactggtaccagcagaagccaggccaggcccccgtgctggtcatctatgatagcagtgaccggccctcaaggatccctgagcgattctctggctccaaatcaggcaacacaaccaccctgaccatcactggggcccaggctgaggatgaggctgattattactatcagttgatagacaaccatgctactcaactcacagtgacacaggcagatggaaaagtgagacacaaaccctttttctgtctgtgtcactcacttcctccggccccagcaggactgtggacacagccatgggcaggtctggctcagttttcctggatctgagaccccagggtgccctgacctccaagccctccagggagactctgaagagagtgggttaggtcaggagaggacttggggctggcaggaccagactgtcctggtattgtccagagtggctgtgtcttggcttaagatgacctgagtgtaaggatagtcagagggagacagccattgagtggtaatggtccctggatttccttctgtatggtgactggacctaaggcagtgctgcttttctgtggcccaaatgccccagatcattctgaacttctcaggtttaactgagaccctcaagccccagctccatgacatcctcatattctgaacagggagggccaccacaatgggcagtgtggtgtccatcaagattcccctttcagggctcacccatccgccatacacccaaagctgccgggaggccctggcttctcacagctgctccccaccggaaaatgccattgattgcaaagaatggcctcccccaaaagtttgcccatgtcagagcgtggctcaggtgcaatgactgcttgatgcctcaatcccaaagtcaggccttaatttaggatggccttgaagtgtgttgcagctgagcactcaattgtaacacattcccactcatgcctcccatacttctttcctgagaatatatccctaaacctcactgcatggaattccccctctcagagtaggagtctggggaattaaaagatttaaaaacaaaccaaaacagtccaaagggaagagtaacaaagaggagagagttgcacagagagaggactctggagtctgcaaatgttcgtgagcaccgatgagcacatatgtgggaggaaacaacctctggaagagaaaagaaccatccaaagacacttgagagaacactccagagcgtgtgtgcacgcacacacacacacactcacaccccacataaagaaaacaacaacactcatcatcatcaaattgctaaaaaacattttagcaattttatgctaaaatgatgatgaagaaatgtggtgaagaaatgtagccttaaaagtagccagagagacgaggtggctcacgcctgtaatccaagcactttgggaggtcgaggcaggtggatcacctgaggtcaggagtttgagaccaggctggccaacatgatgaaaccccgtctgtactaaaaatacaaaaaagttagccggatgtggtggcaagcgtctataatcccagctactcgggaggctgaggcagggagaattgcttgaacctgagaggttgcagtgagctgagatcgcaccactgcattccagcctgggcaacagagcaagactcaatctcaaaaaaaaaaaaaaaaaaaaagtcagaggcaaaagacatgttagatacaggtgaacacaatgacaagagcagaatttttattagaagcaatgcaagcaggaagtagtggagctatatttataaaatatgaaaagaaaaaacttataacccagagcaatctacagcctcactgaaatccctaccaaaataccaatgacatacctcacagaaatagaagaaaaaccccacaattctacaatttgtatggagccacaaaagacccagtatagccaaaatgacactgagcaaaaaacaaaactggaggcatcacattacctaattcaaaatatgctacaaacggccgggcgcggtggctcacgcctgtaatcccagcactttgggaggctgaggcgggcggatcacgaggtcaggagatcgagaccatcttggctaacacggtgaaaccccatctctactaaaaatacaaaaaattagttgggcgtggtggcgggctcctgtggtcccagttactctggaggctgaggcagaagaacggcgtgaacccgggaggcggagctggcagcgagccaagatcgcgccactgcactccagcctgggtgagagagcaagactccgtctcgaagaaaaaataaataaataaaataataggccatatgtgatggctcacacctgtaatcccagcagttaggaggccaaggtgggaggattgcttgagcacaggagtttgagaccaccttgggcaatataatgaaaccctcatctccacaaatttttttttttaaattagccagccttggtggagtgagcctgtggtcccagttacttgggaggctgaagtgggaggatcacttgagcccaggaggtggaggttgcagtgagtcatgatcttaccactgcactctagcctgggcaacagagaaagacactgcttcaaaagcaagcaaacaaccaaaaaatcaagtaatatcattgaaaagggggcaaaggatcagaatagacttttctcaaaagaagataaacaggtggccaacaagcatatgaaaaaatgctcaacgtcactaatcatcaggtgaatgcaaatcaaagccacaacgagacatcatcttaccccagctggaaaggctatcattaaaaagacaaaaaaataacaagtgctggtgaagatgcagacaaaacagaagacaaaaaccacgtgatcatctcaacagtcacatcaaatgttttcatgtagggaaacattactgtttgtgattttccagacttgctagagcatcataaaaagtaagatttgtggtgccgatattggagggggtgttattctgtgcaaaaaacctggatatcccatatccaactgtgaagatacttactgataaatgctaaaaaattgcaatattgtgtgtccaaatgttctgggggtcaggagtggggtctcacacgggaaaggattcagtcaaagagaaaaatagagaggctagaacatagaggaaaacataatatgtctggaaataaggagtccaaactaattggagctgagtgataacaaaagaacaatggcatgaaccatctatttctctctggaaatctcattgatatattgtgctctctccagggctatgcccagctagattataaaattgtctgttcctgaaacgtttcttgcgtatatgacagggcctaacactggaatcaagctcaggttgatgagggcagggcagttaagcacccgaccctggtggcctgtgaaatacttgggggagacaggggtttgttgtctaaagcagaggaagtgagattttccactgtggcttagaccagagcttctgaaattccagtgagcaaacaaatcccctgtggagtctgtttaagatgcagatgcagcctcagcaggtctgcgtggggccccagagtctctatgtccagcagctcccaggtgaggctcatgctgcttgtcctccaagaaccacactttgagtggcttaactcctattcgccctcctcactcaagcacaggtgagactctgccaaggaaggcactgtctgagaagcaaaggtgaccttctgtccttcctcccctggtgttttagtccatgttctattgccataaaggaatatctgaggcagagaaatttataaattttaagaaagatttctttggctgaagcttctgatggccggaagttcaagagtgggcatctgcatctgttgagggcctcaggttgcttccactcatggcagaagatgaaggggagccagtgcgtacagagaccaatgggagagaggaagcaagtcttttcctaacaagaatgcagggatgtaatttaatcatatttataaagtgtttgacatagagcctgacacacccaggtactcctagttggcagcaattattactgtcgtcgcacatgaaaattggacctgggatggaggaaaggcagcgcaaaccctctgtttgggacaagagagacttaaataatttaaaattgaggcataggagataaggagagtatccctgggtgttctcctgccaattctctcagcatctcggaaactgtttcaaggtgatgaagtcaaccagagagggaagcggaggagtttgtagaaccaagggttgcaacttcatccatgaggaggaggtgtagtcaggggattgggaagaggtggctgagctcatctgaagggtgtctaaggttttctggcccccatgtcctggcccatccctccctgcccagggtctcacccctcacctgacagcccagagctggagagtggcctatgattctgattagagaccccaccaaagcccagaggggaagacatgggtgggaggcgtcacagaagacagttttctgcctgtggtgttggggcagtttcctggaaaggaaattcagacactgtaggggagaagaaaacacaggagaggaaggcccctccccaggggattgtggcgttagagaccaaagcatcttcaagaagcccagccctgcaggaggttccctgagcccagagttcctagagctgtctgtattattttgcctggggtgccataaaaagtaacacagactacatgactcaaagaacagaaatttattgtctcactaatcttatggcgatggtagaatctgagatcaaggtgttggcagggttggctccttctgaggctgagggagggtctgtttcatgcctctcccctggcttttggtggtgtagcagtattagctgttccctggcttataggtgaatcaccccaatctctgcctccatgttcatatgacgttttctctctgttcatgtcggtgtccaagttttttctttttataaaaagaccagtcctattggatttggggctcactctattccagtatgacccgatgttaactaatcacatctgcaaccacccttttcctatgtaagttcccattctgaggtcctgatggatagcacttcaccatatgaattccagggggcacaaaattcaaattcccaacaatgggccaggcacggtggctctttgggaggatcccaaatcccagcactttgggaggccaaggtgggcggatcacatgaggtcaagagttcaagatcagcctggccaactggtgaaaccctgtctctagtaaaaatacaaaaattagctgggcgtggtggtgcgtgcctgtagtcccagctactcgggaggctgaggcaggagaatcgcttgaacctgggaggtagaggttgcagtgagccaagatcgttccactgcactctagcctgagcgatagagtgagacttcatctcaaaacaaaaaacgaattcccaacaatgcctcagacatggcttaagctgcccactggggctctgcaggtgggatgtgcaccaccaagctctcaggtggggcattacctgacagcccagaaggactccgggccctctgcaaagtgcctgatctcttgcgcaccttaaaaggtagcttttcaggctgttcttgttcttttcatgctgacgtaggagattttatcctctgctttttaagtagaagcttccttaccctcctcatcatcctgagtagatgcctaggctggtttcagagaaatcaaaccagggtggattatgagttatattagccaccagctgtcaatattctctgaatgcccagcatccatccatgctctctgaccatcaccagagtgagcaaatctctgacatgtggataagagtttcttccatgggctcccagccaggctgtaagtgagaccagaatacccttccttcagtgcatggggctcagtgcagctgcctccctgacagtctccctgggacattaagcttgtcagcttctctcttccaaatgcaggtctggttgtcctaagcccagctcagcgctgctgtggactttgcatcctaaaaacattatcaactctgccttgtgcctcagtggactggcctggaggaaacaatatgaggtgtcctggctctttccacccccagcgtctctctccctcagtggtaccagtacggtcctcatgacggttcatctatacctgccaatctaggcctccacactgccgactgtggatggtcacagaacccaaaatgctaatcagccttaagcagatcatgctaatagtttctgcagatctgggtgcctcatcccagatctaggagttcacaagctaggccagctccagggagataacatgtatcacagagtctggacacgacaaagtggctttgctgtatttttgctgggacacatgatggtgatatcaataagaactggctcaggtccctgcagcttaaggcccattgaacaggaaagcagccaggaggatgtgctgccttttgacctgtacacaaatcagtgccatgtgccgactgtgtgtgaatatctgtgcctgtgtgtatatttgtgtacatgtgtgtatgtatgtgtacgtgtccaagttggtgttgcaaggaagtgttcctactgtcaaatgtttcaaactcaaatcttttctgttttcctaacttacctgcttcttctatctctagtgcctttgttctgcactaagaataaggatgaagattagggtagtaatactagcaggaggagtaaagattcatatgtgtttaatacatatcaagcagtcttccaagtacttcatatttattaattcccttcatctcaacaactctatgagttgttcattatccctccgttttacagttgggaaatctatgatacatagattttgagaaatgggaaaactaatgcagagaaaagaagaataacatgcctgatgtcagaactagaaagtggctgacccaggagtagaatctcaggtcttctggccccagaaaacctgttcttaggcaccatcctgtcgcctgtcattgcatcaatgtggtaaggcattggtgtgtctttaaggctccagaaagttctttctactttgtatttattttgttttgtttttgagacagagtcttactctgtcacccaggctggagtgcagtggcaccatcacaggtcactaaagtctcaaccttctgggctgaagagatcctctcatctcagcctcctgagtagctgggactacaggtgaatactaccatgcccagataattttaaagtttttttgtacagatggggtctcactatgttgcgtaggctgttctcaaactcctgggctcaaccaatcttcctgcctgagcctcccaaagttctgcaattataggcatgagccactgtgcccaacctttactttttaaaagtatcatattgtgactttgagtgcaccagcagtgctctagtgctggtctattagaaatgtaattttaagaatatatatatataatatacaattttttagtggccacatttaaaaggtaaaagaaacaggtggaatttatgttcataatatattgtgtttaaatgatttatccaaaatattatttcagcatgcattcagtattaaaatattgagatatttattttatttttgtactaattctttgaaatctggtgtgttttactcctacagcacatcttacctcagactacccatgtttccagggctcagtagctccctgggactcatggccgccatattggacacagcaagtccagatggataaaggtccatttgggtcacagcccctgcagtacatactgacagctacctgggaagaatggagagttccatgacccaaagggcctcctgagggaggaatggcagctctactttccagccaaagcaggaatattgagggcactaagaaacaagggaatttttacagtgtgtttcacacttcttcccttctcaaagacattaaatataacttcaattttaaaggtgaacctcggccatcaaaggcatgttttctattggtctctttccggtggaatgaatggcaatggtccctgtaaattgtgctccaaggatccctttcagtgggaagattcttgtgataagcccaataacaagtaagaaagcaattttttatacatagatctagaacaaaaagggctcatgatgaagaatattttattgaagcttagtgtattgctatttttcataaattgctgtttttgcctatcccacaagcactgatcacttttatgaaggtacattctccaagggtcgtcttagcatgtcaggacccacaagcaaaggtgttacaagtgacctgcacgagtggccagcaggacacctggaggagcccagtgagatgaggagtggatgcgcatcaggtgggaaggcatggagaagctgtgtgccacacactcaccaaggacaggagcgggcgtatttgtggcctgtggcctaatcttaggtcagttacctctttagactaaatcccaaggagtcagcacatggaggtttcggtccgtgcacatggcacctacagggcttcacatgacgttgctaattacaatgcagcggcacttacaaaggaattagtttcatcacatcctcagcagaactaggtctaaaaaccaatatatatgtataggatatcaggtgagaaatactttcttgccaatcatgtgtattaacgttaaagtggttcagtatctagtgtgacagttgttcaggcttagtggccttgaccacgtcaaaaatggaatcctgatcctaacttgtctagagattagcctggcacaaggagcatgaccaggcatctggatgtccccagtgtcactgcagacacatgctcctttttcatctgccagagggagcattaggatgtcctcacctctgtccccagaactcaggaagggcagtacacctgactaaagagtagagggttgtgaaaagagggacctagggcactggataagcaggaggagaaggagcactgggtgggaggtagagaaaggagggggctgaatggttaggctctgaggtgtgtctcctggatggagtcttggattccactcactaccatctgagaactttgagaaaaccgtgtaacctcctgatgttgggtctcttgtcagtagacatcagtgctttcctgatgtatagggttactgtagaattataatgaatgcctggttgaggtgacatgtctaatacaccctccaaagcatcaggcatatattaagtactcataagcaggcattctgtgtgaactagtcatacatggaagatgacattccccgtgtgggcacagtaggatgctgtggactttggtttggggaccctaataacttcaagtcccctggtagcacccaagtgtaaaaggcaaagggcatgactggtgcttcctgtgaggcctcttctatttggtaaaattcactctccactcatcgcacccacctggcctttattctaaacttggaaaattgctaacatgaaggtctcagcctcagggctcagataagaactcagacacatcaatagagaggatggctgaggtgcttggccgagctcagtgaacaccccagaacaggaactgaggagtgtatgcatgtgttgggggcagcactttctcactcatccagaaagtgtgaggaatctgtacagaactggggacagggcccatttttatacccttctataagcccagcccttgtctgctcactagggagccattcaccaaggccacaggagggaaggaagtagatttgcatgaagagcatccccttcctatgttaagagaggcctggaggccccttcccagctgtggactcagaggcagagctctggggcatctccaccatggcctggacccctcccctgctcaccctcctcactctctgcacaggtgctgcctcctagggctcagcccccacaggaccaagaatcagcctggccctgacattcagctcagcacagggagtaatgcagggtgtggggctctggaaatgagacccttatcttcagactcacctcttctctcttctcttgcaggctccgtggtttcctctgagctgagtcaggagcctgcagtgtctgtggccttgggatagacagccaggatcacctgccagggagacagcatagaagactccgttgtaaactggtacaagcagaagccaagccaggcccctgggctggtcatctaacttaacagtgtccagtcttcagggattcctaagaaattctctggctccagctcagggaacatggccaccctgaccatcactgggattcaggttgaagacaaggctgactattactgtcagtcatgggacagcagtcgtactcattccgcggtgacacaggcagaaggggaagtgagacaaaaaccttttctccatctgtcacactctttcttcagctccaggaaaaaactgtggacaaattcatgagcaggtcttgccctgttcacccagatatgagaccttgaggctgcccttccctccaggtctccaggtaggctatgaaaagggtgaatcaggagtcaatacacacacaattattataattttattcttgtttgaagaagaagtagaggaataattgaacatgtaaagtgaaaacatggaaaaccgaaaaagaggaattattgaacttgtaaagatgaaaactacaatgtctgaaatttagaaaatacactgggtgagtttgacaacagaaaaaagattagctgcaaaaaaaaagattagctgcaaaaaaaaagattagcaaattgtataatacagcagtagaaattgtccaagatgaaacacatatgggaaaaataattatggaaattaatgatagaaaggaacagagtatcagtgagttgtaggacaacttcaaacagcctaaagtatgtgtaattagtgtttgaaatagaaatgggtggaggagaaatagaaaaaagtatttgcataaataatggccaaatatttttcacctttggtgaaaaccataaactgaaatatccaagaagctcaacaaaattcaagtataggagacatgaaggaaacaactccaacataaatcataatcaaattaataaaatccagtgatgaagagtcacctaaataataatgctaagagcagttctcattaaaagcaatgcaagaaagaagacggcggagcaatgtcttgaaaacactaaaagaagaatcctgtcaaccttgaattctttttcttttcttttcattttctttctttctttttcttttcttttcttttctttttttctttattttttttttttgagacagggtcttactctgtcacccaggctggagtgcagtggcacaatctcagttcacaacatccagggcttacatgatcctcccacttcagcctcccaagtagctgggaccacaggcgtgcaacactatgcccaggtaattttgtattttttgtagagatgaggttttaccgtgttgcccgggctgatctcaaacttgtgcacttaagcaatctgcccgcatcagcttcccaaagtgctgggactccaggtgtgaaccactgggcctgccaaccttgaatttttttaataaaaacaaacaaacaaaaactttcaaaaaaggagacaaaataaaccctttccagacatatgccaaattaaagaattggttgctatcagactcttacaattagaaatggtcaaggacatccctagacagaaggaaaatgataccacaatgaaatgtgaatttataccgaaaaatgaaaacatcagatatagtaaccacaaggataaacatagaaacctctgaattgtgttaatgtctaataaagataattaacacttcaaagaaaagctaacgtaaatacattgtgatttgtaatgaaaatgaaagtaaattatgtgacaaagcacaaaagctgaagggatgaacaacatgttataatggtcttatactatatgtgaatatataataacacttgaaggtaaaccttgataagttatatacgtactgtaaacccaagcaatcattaagatcaacttttttttttttttttttttttggagtctggctcagtcgcccaggctggagtgcagtggcacgatcttggctcactgcaagctccgcctcttgggttcacgccattctcctgcctcagcctcccaagtagctgggactacaggcacccaccactacgcccggctaacttttttgtatttttagtagagacagggtttcactgtgttagccaggatggtctcgatcttctgacctcgtgatctgcccgcctcggcctcccaaagataaacccttttaacagaaataattatggctagtaagccatattagagttctccacagaaacaaaatcaataggatatgtatgtgtgtatatatgtataatgtatatatgtgtatatgcatgtgtacatataatgtatatgtgtgtatatacatatctaggtacatatatatggagaagaaattggttcatacaattgtggctgactaggatgaaatctactgggcaggctgaaggctggacatttaggtaagagttgatctcgcagttttgagtctgaattctgcaaggtgggacttcaggaatcctcagtatttgctctgaaaaccttcagctcattaatgatgcccacatgcattgtggagagcagtgtgcttatataaagtctacagatataaatgttaatcacatctgaaaattatcttcgtgccaacttctatactcgtatttgacaaaatcaactaggcactatacctagtcaatctaacacttaaaattaaacatcacttaaaccagcaaggagataaaaagaaataatttttaaaaatcagtcaaaaaaaggaaacagaaaaagggaaggagaagcaatgaacatatggcacaaatagaaaatgaagggcaagttggcatatttcaaccaaattatgttactaatcacattaattgtaaatagtctaaatatcacaattaaaaggcagagattgtcatgttgaaatgaacaagactcaactatacatgctgcctagaaaaaaaaccacttcaaattataaaaccacaaaaatccaagtacaaattaaggacaattccccccactcccaagtctgtttcacaaagcagtacaaagaaggattcacagtaaattttttttttttgaagtcttactgtgtcacccaggctagagtacagtggcaccatcttggctcactgcaacctccaccttccaggttcaagtgattctcctgcctcagcctctggagtagctgggattgcctgccaccatgtctgatgaatttttgtagttttagtagagacagggtttcaccgtgttggccaggctggtctcgaccttctgacctcaagtgatccgctggccttagcctctcaaagtgctgggattacaggtgtgagccaccatgcccagcccacagtgaactcttaacacacagttatagaaatatgcatcacctctcccatcaccctttcctctctctggcttccaaaaccttggttctggtaccagagctgagggaaaacattccacagaaatattaaatcaaggtgaagaagggagattctcaagatgtaagtaaaaggcaaatgagggaatggaagtcgcaatgcccttgcatgcataaggacagctcctgcatgagaatgttgtttgaaacattaccgaggaattggtgtccatgttcatgcaggacataggtctataggatatttttgtcatgcctttgtcgggctctggtatcagagtaattcaggcctcaaataggtagtagggaaatgtttgcttctcctctatattctgaaggagattgtgtatgattggtgtcatttcttccataaaaacttgatagaatttaccagtgaagtcatttgtactaggtgggcttttcttagcaggaagattttaaattgctaattcaatatatttatgtgtcatagatctattcagattttctcctttatgaatcgattttgataatttatgtatttccagatacttatccacttcatttaagtcatccataattttggcatttattgttcgcattattccctataaccattgtaccttttgtaaggtcagtggtgatgtcactctttaagtcatggttttgacaatttgggtcaggagaagatttggaggaggagagaacaaggttgtcttgatgttgtcttggctggagtgtgacttggagaaaaatgacttgaatgaaaatacagtcagagggagatatctgtcaagtggttctggtgcctggatttccacatgtgtggtgacggagcccagcccagtgctctactcatgcccagatgtcctggattattcccctgaaatactcaggtgaagctccagctacaccatggcatcctgatattttaaacagagaagaccagtgtcatgggcactggtgatctgctcctcagggcagactcactaaccgtggcagctgggaatcccaggggcctcacagctctcactaaccgtggcagctgggaatcccagggtcctcacagctctcactaaccgtggcagctgggaatcccagggccctcacagctctcactaaccgtggcagctgggaatcccagggccctcacagctcttttctccctcaaattgctgctggctacagagaactgcctccaccaagggcatgcccctttcacagtgtggctcaggcctaataactgcatgagactgaaataccaaggccctgtctcaggttaggatgaccttgcagggcctcccagatgagtcctcaactggagtcagatttcaggctgcccagttgtgcccccccatacttccttccagagcgaatatctccaaacactactgtatgcaattttccctctcagagtctgattccagggaacacaaaatagaaaacagtctacaaggaagagtacggaagaagagagagcagcacagagacaggactctggaatctgcaaatattcctgagcactgatgatcccatgagtggaaggaaaatacttaaggccaagaaaagaaccacccaaagacatttgagggaacaattgcagggcatgtgcatgcgcgtgtgtgcgcacacacacactcacacacacacacacacaccatcagaatagagtttgttcctacaaccagtgtggaaatgtgtctaatcagaggcatcaggttaactaatcagaatttctctgccctggctgagcaaagtggcttacacttgtaatcccagcaatttgggaggctgaggcaggaggatcacttgaggccaggagttcgagaccagcctgggcaacattgtgaaaccccatctctacagaaaacttaaaaaatatagctaagcatggggacatgcacctgtagtcctagctaatcaggaggttttaagcatgaggactgcttcttgagcccaggagttcaaggctgtattgagccatgatctcgccacacagtttcaaaaaaaagaaaagaaaagagaaaaaaaaatgaataagaaaagctctgccttagtatagggggaactaactatagactaaaatctgctcctatccctcctaggacaccgtaagagcaagttcagaaaggaacatactctcttcaagaaacccttctgaatcaaagaagacaaaaatatgtggagaaatataaaaatatcatgcacctaaaaagcaaaacttcacgatgtctggcatcttattacaatagcaggacaacgtgagtcagaagtaaaaaagttggtcagcgcatcatggccctgaaattgcacaggtaatacactttctagaccagaacaaaaagcagttgttgtaactgtaatccatttgtcctggagggtagagtattgatggaacaagttaaatggagacatgaaagacatttaaaaaacacctacatttaagtcctagaaatgaccacagaaatatatgaaatcaaagtactttgaatgagattgctggtatattacatgctgaaaaagaagagattagtgaatctgatgatatagtaatgagaactattcaaaatgaaatatgcaaaactactgaaaatgacaagaaaagagcatcgttgagttatgggacaactgcatgccaatgcaacctaaaataacgtaatttgtgttactgaaaaaaagaagttggtgggggtaggggagtatatagaaaaactacaaaacaaaataatgactaaaaatgatccaaattttgtgaacatcataagccatccattttcacgaagctcaaccagcccctgacaaaatatattttaaaatataaatacgttaagataacaataccaacacatatcataatcaaattgctaaagcacagtgatgaagagacactcttaaaagcagccagaaagaaaagacatgttagatataatactaagagcagagttctcattagaagcaatgcatgcaagaagacaggtagctacatctttataatattaaaaggaacaactgtcaaccctgcagtctttacccggtgaaatatctctcaaaaatgaaggccaaataaaacctttttcaaataaataaaacttacagaattgataaatcacaagccgtcactaaaagaaatgatgaaagacatccctcatacagaacaaaaattataccagatagaagtgtgaatctgcacaaagaatgaaaagcatcagaaatggtgactacatggataaatattttaatagtgcataatgtagaaataaaagggcttgaacagcactatagaacaactagacttaaccgatgcctgtagaactcttcaagcaacaaaagcagaatgcacattcttcttgcatgcacatggaacattctccagaaaaaccgtataaaacagattgataatttttaaaaagatagaaatcacacaaagtatgttcccaaaacaatgtcattagagaaatccaaaaaattgagggaagaccatgaaaactgcatgaaaaaaattgagatgaatggacaaatcactagaaatacaaattctattagaagtgactcaagaagaaatagaaaacccgattaaaactatagaaagagattaagttaataataataagaaaagccttcccataaggaaaggcccagacacagagggcctcactggtgactattaccaaatgtttaaagaagaattaatataatttatcattaaacttttccaaaatataaaagagataaaatcacttgccaactctttctctgaggccaatattaccctgataccaaaaccagacagagccattacaagaaaagataaatacagagcaatgaccttactggatatagatactaaagtccttaacaaaataccagaaaatgtaatctaacaagatataaaaagaagtacatacaataaccaagtggtgtttatccgaggaatgcaatgatggtttaacatctgtaattgaattaattaatagaaggcatcgtattaatagaagaaaggacgaaccatattgtcatctcaaaatcacttaaaatgttttcatgcaagcagactttctttcttgctgtttttaggccatcatgagaagtggagatggcatggggtagtatttcatgcaaagaatctggatattccatactcaactgtgaggatactttctgataaatgtaaaagattgtaatattacgtttctgtatgttcagagaacacttcctagacaagatatgtgtacagaaccgaaaggacaattaggattttggcaggcattgagtgaggagtggagtcactgcaagtgtcagtcagagaacaagaaagatgttaggaaccatgtatttctacctggccatcctactgggataccatccccttcctaacacatcacccatgtggcttgtaaaaatgtccatacttgaaacattttgtccacataattacaggtctagtgctggaatcaagttccctttgatgacatcaggacagttaaaggatctgcgtgtctaactgcccccaggtgatgctaacattgctgccctctgaggaccacaagcaaagtagctcagctcctgacctcctgctcccagcacaggtgagatgcacctcagctacatctgtgaagcccaggagactttctctccctcctcaggctccctggagtgatgacccaggactcatgcctctgcacatttatcctttccctcagagtttggggccttatcagtcctgttacatcttctcagcatctgaaaccactggagaggtggtcaccatctcctgtgctgacacagcagtgacattgggggttataattctgtctcttggtaacaaaagcaacagggaagagccccatatgactgaggggtgagatcaggaaaaagcctcagagattccagttctaatctcaggccgttctttgtattcttttatgagctagttagtcagctggtcagtcagctgtggccacaagaagaaatggaagagaggttcagaaaacagccctagagaccatagacccagagctctagagacagcaggcccaatgtgctacacagggccacagggaaaggcatcaggttcattagaagacagaagacaggagggcaggggatcccttagaccatgacttttatcagaatttcctcaggaaaagcagggcaagctaaaaaatttatgattggccagcctgaataatgtcagcaggctttgggctactaaggtggtctctagctgcttggtacctggccctgggacgataaaggcagaggaatattgtatcctgggatgcacaaaccagacaggggtggtgaggctctgaacacgttagtttccatatgaaaggcaggcttctggctgagcccattgctctttcaaggaatagagaactggggagacccaggaggggtggtcttttcccagacagaaatgttttttaagatgtcaaaatatcaaaatatatagaaaattatatacagttgacccttgaataacattggtttgaactgcatgggtccattgattttcttctgcccctgtcacccctgagacagcaagatcaacccctcttcttgctcttcctcttcagctactcaacccgaatataaaaaagataaaatcctttatgacgattcagttccatttaatgactagtaaatatattttctcttccttatgatttttaaaataacattttctgttctctggcttacttcattataaaaaatactgtatataatatacataacatacacaatctgtgttaattgactgtctaagctaggcctggctctgaccctgatcctgggagacactttaggcagattactctggaaataagtccctcagtctctgaccatctctctctcctcggcgggttctctgtcctcccatgggagctcagtgcccatggtgcagacagcccctctcagctgctcaggaccaagtagggaagctctgctctgtcttggtacccgcagaacccaggctggtgcccatgctgggactttaatgtggtgacaaaactcctcatgcagtgctgattgattctctgacagtgtctaggaatgtaattcccctgaccaggggacaggttgaggatgagtttcaggggggatgacaacaagacttccaatgacacagccacagggagaattgagatgcacaatctgctgtccccagcctggatcacacgctccccctgcatttaggaaagttgcttagaattaggctgaagaggtcaggattcagttttaacattgacctctctctcattttctcttttactctcttttctccttctctcttcctctctctttctttctctttctctatgatactgaagcccttattcacccccattctcagctatgaaatggacatggaaccctgacatcgtgagtttcctcaaggatcacaggagtggagtaaagatctgagccctgtctccaggtgtcctcaagggtctacatcacaggctcctccatcctgctcttcccttacacaggggctcccctcagatcctgcccatgcctaaatttaggccccatttctttgagacctgtggacacttcatcctgaggttcctgagggtttttctccctgctgacgggagatcccactgatcacatggtctgcttgttgtttctcaatcctggagcacagctgcaagtgtcacctgagacacggccaatcccccatacaggacagcagtgaaggtggaagaatcccagagtgaccgggtaccgtcattcattcaaattccatggggctcttgctgcatcactgggtgtcatcctttgggaacctggacttctaaactataagactcagagttagaaaacagaatcataaattccccatgtaagccactacttccacccctggtcctggactcagatatgttactaatgaggaacacagttcctcatagtggctgctgattgaggacatggtgggcaaactgtggttgatggacacatctgtcttgcatcctgcattggaacacagtcttgctcatgtctttatgagtgacatgtggctgttttcatgctgcaatacaaggcttggttgtggtgacagagatcctatggtctgaaaatctgaaatactatactaaaggtcccatactgtatcatgtcttctacatgaattatctacaatagacaaatccatgcaggcagaaagaagatgagtggttgcccagaattggagaaggtgatgaaagaggagaggctgctcactgggtgcagaattttcttttgggtgatgaaaatgtaggagaactacacacacagctggtggctgcccaacaaagtgaaggtgctaagtgccactgcgttgtacattttgaagtgattaattctaggttatatgaattccacacaatacaaaactatgattttcagaaattgactgttataattgtgttattatatctacaactttatgatggcactaaaggaccatgagcagtcaatgcaaaggatccagacaatatttcaagggctcttccagagtaacaagacatgaaaaggcagctctggttctctcttgcctggcgtattttaccctcggagttttttgtttttttgtgttgttgttgttgttgttgttgttattgttgttgttgttgttacagagtctcgctctgtcgcccaggttggagtgcagtggcgcgatctcggctcactgcaagctctgcctcccgggttcacgccattctcctgcctcagcctcctgagtagctgggactacaggcgcccgccaccgcgcccggctaattttttgtatttttagtagagacggggtttcaccgtgttagccaggatggtctcgatctcctgacctcgtgatccgcccgcctcggcctcccaaagtgctgggattacaggcttgagccaccgcgcccagccaaccctcggagtttttatgagcaccgaagggtgcagggagctggaagctacccaccaggtgcctggctcactcatgtctgggtgcagcagctcccccaacaggcagctggcagaactgaaagggaagagctatatccttctgagcccccacaattgtggtgcaggattgttcccgacactcccatccagtctgcttgctcctgcacacttagaaatgatcattatttctgcccaggacctccctggtcttgctctcccctcttcctccccaggcgaccttgggaactttactcaccctctggcccttccctcctctgtccagtgttttccccacccactgtgatcagctcagatcagcgagtctgtgggacattagggatcagtcacccatgtgaggccctcgacggggtcccaggatggagcagtgtatgtccccacaaggctgcttattgcacaagtaatggaggaacaaaggggtgggtaagccccctcctgggcagcttcagaccctgctaaaataggaaacagcctggggcaggtctgaccccacttgtgtctctcctgcccccaccccagcagcagcgtcctggaggccataccatgtgctaagcagatgccaagatcacgtcattcatcatcacctggaaattcccctaaccacaccttaatacgctgcactcgtgcctcagctaaaagtatcacacactgcattgcaatgagtttggatcccagacccccttgatgtttgtcactgctctttcagatcctcgaaaacacctacccctccctgcaggtcagtgacagactcttcttcctcacacttcctttcactgtttcttccttcctgagagcagctccagagactcctcttcagggaggcgccccaacctctgattacacagcagtctgcctgtcattttctgtgtatgcattctattaatgatctgcagagcacctaaacttcatgcctcttttcctaacatgtttattaattgattttctggtgctaaatactcctacaatcaatcaaaaatgcttctcctctgcttggacactcatgagaaacagtcatgaaccatttgctattttatcctcaaaaagtaagtgtggagttcactgctgttccccacatactcaccaaataatgagaaacccagcaattacccaactttctgctccaccatcatgacacagtaggcttttctttcatttgtgtggacttaagacctcaggatggctgctgcagctccagctattatacccatattcaagagcaaaggtgctgcacgaaaacagtctgtttatttccatcacaagagaaaatgttccctgagaagatctccaaccacctgacccttacagccctggggccagcatgggaccatgtggtcagtccaagccaagagtgaccagggaaaacaaggatctttttgtaaataaatagaggagaaaatacacaggtagaagatggtgcttctactacaaactgtttctattacacagccccaacccccatgtaggaaactcctggggtcagagacagtctttctcgtgctgaattcccaggatggaatattgccggatcagagtgggtctcaataaatactggctgggtggatatgctcctgcctttgtttttggggcaggagccaccactgcctcatgtttttctacacctggagccatgaaacttggtgtctgaggtctgcggcactatatgcagagccttggtaagatgcactggaccacttaccaacccagtgacagtagagggatgtcttaggtgggccctacccattttcctccaataggacgtgctcataatttcatgggtaaccgagccccttatgcctggtattgaggcatataaggccaaataaagaagaggaattcctctcttggaaccagcagtccatggacaagggaatcagggacctgagcagcaggttctgaatccacacctgatctggggcaggacccagaacctatcaaagtcttctgctgttaactatagaatgggctcacaaaatgcagacagaatgatctgtgaactccacctggcctggctagctgagaaccaaggccaagacatagtttaaggtaaagatgttggcccagactttgggaccagcaagtgaaggagaattctgtgggctgaggtgggtctgtagggtcctcccctcccctctctgtgtcccttggggctgagcccttctctggaaactacaaagctactccagtagcagcccctgattctgctgacttgcatcacgggccgctttctccatcaaggggataagagaggcctgggagaaacctacccgccctgggccacaggaagcagcatcagggatgtctcagtcatggactggacctttctcagcctcctcgctcactgcacaggtgctgccgccagagtcccagccacccgcccagccccgggctgtgggaccaggctggccttgattgtgagctcagcagggctctgcctgtggtggaaaggatgctcatgaccttgctgcagggtgaggggctggtaaggttgaaatcttcctgtactcctgtgctcatgggcactctgaggggcacagtcaggctccctttcatcccagaagctctgtcccagccaggcaggtgcaaaggaatcctgaggatcagctcctcagcttcaagccttttctccctcatctcctgcaggtttcatggccacatatgagctgtctcagccaccctcagtgtcagtggccccattacagatggccaggatcacctgctgtggaaatactgttggaggtggatatgtttattggtaccagcagaagtcaggccagacccctgtgccggtcatctataaagacagcaagtggccctcaaggacccctgagtgattctctggctccaacttgtggaacacagccactctgaccattagtggggcccaggccagggacgaggctattactgtagcacctatgatggctgagggagcagcaggcagtggctcacagtgaaacagacagatggggatgtgggacaggaacctctaatataactaggctcaatatctcacatcctctctaagccaggatgtccaacattttggcttctctgggccacattggaagaagaaaaattgtcttgggccacacataaatacattaacactaacaatagctgatgagcttaaaaaattgcaaaaaaatctcataaagttttaagaaagtttacaaatttatgtagggccacgttcaaagccatcctaggctgcatgtggcctgcaggctgcaggctggacaagcttgctctaagcagtgaccatgactttggtctcagttcactcaggtggtttctcatggtagccaaagcagcaggagaaactgtcggatttctatttaaccatgaattttacaattacattcattgtaaatccaaacatcttgtccctttattacctgggccctacagagactagtgcacaggttcatgggataagaaatgtctccagagagcttggtttctgcactagagacagtcgtttccctccctttcaacacagagtgtggcaggaaaggaaccagttctctgagctaaccctgagaacttgggcttgagaaaaagaaagcattttgaaccagtaggattgtgcccacagaatgagatgtgctactctggcccagcccaactcctttcatttcaggagctctgtctgggccaggcaggtgcaatggaatcctagggatcagctcctcagtttcaagccttttcttctctgggtgtctgagaacaggagttgtcttgcacgtgcacatgagaaagaagtgcacacacgactctcaggtgtgagcagcaaagacagaacaaacctttccagaaggggcaaatttcattaagatgacagggccttgttacacaaccccacatgtctggactgggatctcctattggatcttgccataaatgcaaggtttcttctcccatcataaattcctgcattgcagtagacccagctgggttctagggctcaaccagcagggcactcccaccactgtgtggacctgctgcagagccttcctgctctaggacccacagacatgcaacttttctttgtttttgctatttgggttggagcaacatcccaagagtgaataatgcttcttccagaatccatcatgaccatatatacttcttgatgcgaagttaggatgtaataatgtgtcctttttttctatgggaggtgctcagctgttccaaacaagaagaccctaaacatttctgctcatatgaaggatgactccctaggtttgctttcctattctctgaatgcatgggtctccccaaatcttccaatgacctttcactgcatgcacatctcatccaaataccaccacatggtggatgcttgggcatggtagcgggtgcctgtaatcccagctacttgggaggctgagacaggagaatcacttgaacccaggaggcaaaggttgcagtaagccaagattgcaccactgcactccagcctgggtgacagagcaagacttggtctcaaaaaaaaaaaaaaaaaaaaaaagaaagaaaagtttatatttttgttctaatggttatcttaatatcttcattctataattatatgttttatataattataatagctatataagatataatacccctagtatgttgttttttggatattctacttgctcctgatggttaatttatgtgtcaacttggctaagctatggtgtcccgttgtttggtcaaatacttgtcaatatcttgctgggaggttatttcatagatgtgattaacactgacagtcaattgactttaagtaaaacagatcacccaccataatatgggtgggccacctccaatcagttgaaggccttaagaacaaaaactgaggtttcccagagaagcaggaattctgcttcaagactgtaacacacaaaccctgcctgagtttctggcctgctgactgctctacagattttaggttccagacttcgagatcaactcttacctgaatttatagcctgctggtttgccctacagattttaaacttgctagtccccacaattatgtaagccaattcctaaataaatctctctatgtataacctattggtttagcttctctgaaaagctttcacatccagtttcctggatgttaagaattactgaaactagctagtaacttactttttttttttttttttttgagacagagttttggtcttgttgcccaggctggaatgcaatggcacaatctcagctcacctcaacctccacttcctgggtccaagcaattctcttccctcagcctcctgagtagctgggattacaggcatatgccaccatgcttggctaatttttgtatttttagtagagacacggcttctccatgttggtcaggctggtcttgaactcccaacctcaggtgatccgccgccttggcctcacaaagtgcctcacatgagccaccacgcctggctcctagtaaattcttcttttccgtgatgtgtctcttacctctaataatacttttcttcttaaagtctacttcattaaaaatagttatgctgggcatggtggctcatggctgtaatctcggcactttgttggaggtcgaggtgggtggatcactgaagcccaggagttcaagaccagcctgggcaacatggcgagaccctgcctctacaaaaaatacaaaaattagctgggtgtggctaatataattctaagttggcacacttgtagtcccagctacttgggatgctgaggtgggagaatcgcttgagcctagaagggagagattgctgtaagccaagatcacatcattgcactccagcctgggagacagtgaggctctatctccaaaaaaaaaaaaaaaaaaaaaaaaagttatacagctttcttggttagtacatgcatgacatatttttcattattttctacctctctgtatccttatataaaaggcattagttgggttttactttattttcaattattttaatttttattgtccttttaaatgtaactaatgatttatttacgttgaaacccaccaccaatttgttttccatgcctattctatttcttcttatctcctctcacatcttgttttggatttattatttttattatttaatttcctccttctctattagtttcataactgtgcagtcttagagttattttaaaagatgacagtggattattttagagcttacaacatgcatccttcacttatcaaagcctaacatgagctagtactttttgttgtggttgagacagagagagtcttcctctgctgcccaggctggagtgcagtggagcaatcttggttcactgcaacctccacttcttgggttcaagcaattctcctgcttcagtcacctgagtagctgggaccacaggtgtgcaccactatgcccggctaatttttgtattcttttttagtagagacagggtttcaccatgttggccaggctggtcttgaactcctgaccttaagagatctgcttacctcggcgtcctaaagtgttgggattacaggcgtgagccaccacgcccagcctatgagttagtacttctatcctcttcctagtcagtagaagaaccttggaacaggaactaaatttacccccagtgacttatatgctaatatttttgtgtattttaaacatatgtgtgtgcatagatgtatctgtgtgttttttgtgtttttattcttatttatgttgagagtgtagagctatgtaagagtaaagagaattgtgtaatgaagccccgagtatccattcaatttcaacaacaatcttatggccaagctcatttcatgtatactctttcctgcttccctctaccccacattatttcagtgcaaatcccagatatataactgtacccatacatatttcagtatgttttatttattttaaaccccacaagatatcattttctatactactgtaatttcataccaataacattcatttagatttacccacacatctacctcttctgttaccctttatttttatttataaaaatatctttgggaaaaaatatccttcagcacatggtcaaggatctcctgagggctatgtcatggacaaaatatacatatatattccatatatatacacacatatacacacacacatatatacacatacacacacacacacacacacacacacacacacacacatatatattccactttcacttttttgtttgttttttgagaccgagtcttgctctgtggcccaggctggagtgcagtggtgggatctcagctcactgcaacttctacctcctgggttcaggtgattctcccgtctcagcctcctgagtagctgggattacaggtgttagccatcacgtctggctaatttttgtttgtttgtttgtttttgagacggagtatcactctgttgcccaggctggagtgcagtggcatgatctcggctcactgcaacctccatctccctggttcaagcaattcccctgcctcagccttccaaggagctgggattacaggtgcatgccaccatgcctggataatttttttgtatttgtagtagagaccgggtttccctatgatggtcagactagtcttgaacttctgacttcaggcaatccgcccacctcggcctctcaaagtgctgggattataggcatgagccaccgtgactggcctgttttttttttttttgagatggagttttgctctgtcaccctggctggagtgcagtggcaagatcttggctcactgcaacctccacctctcgggttcaagcaattcttgtgcctcagcctcctgagtagctgggattacaggcatccaccaccacatctggctaatttgtgtatttttggtagagatggggtttcaccatgttggccaggctggtctcgaacttctgacctcaggtgatccacctgcctcggccttccaaagtgctgggattacagggaggagccaccatgcccagccattttcacttttgaaggatattgttagtgagcatagaattctaggttggcagatattttctttcctcagtttgaaaacatgattccttgtatctgatttctcctgcttttattgggaagccaattctcaatctaattttgctcatttgaaggcaatggctttttatgttgttgtgttttctgagatggagtcttactctgtcgcccaggctggagtgcagtagtgcaatctcagctcactgcaacctctgcctcctgggttcaagtgattcttctgcctcagcctcccaagtagctgggattacaggtgtccaccatcacacctggctaattgttgtatttttaatagagatgaacttttgccatgttggtcaggctgatcccaaactcctcatttcaggtgatccgcccgcctcagcctcccaaatgctgggattacaggcatgagccagcccccaaccctggcctgaaggcagtatcttttttcctctggctgctttgaaaagttttgtctttgttttgagcagtttacactgatgcattgaggtggctcttcattccatgacttgattcttttttgtccattttagaaaattgtcagctttatctcttcaagtattacgtcttccccatcctctctctactctccttatgagactccaatttcacatgacttatgccttgttaaagtatcccccatgtctcttaatccattcctgtatgttctatctatttttctctttgtacttcaatttgtatagtttgtatcaaactatctcccaattagccgggcgtggtggtgggtgcctgtaatcccagctacttgggaggctgaggcaggagaattgcttgaacccgggatgtggaagttgtagtgagccgagatcatgccactgcactctagcctgggcaacagagtgagaccctgtctcaataaataaataaatacatacatacatacatacatacatacatacatacatacataccagttcactattttttttatgtttgtgtctagtgtgctgttcaaattgagttcctaattccattttttttgagacttttttttttttgagtctctatctgttgcccaggctggagttcagtggtgcaatctcaactcactgtagcctccatctcccaggttcaagggattctcatgcctcagcctctcgagtaactgggattaccaccatgcctaactcatttttgtatttttagtagagatggggttctgccatgttggccaggctggtcttgaactcctggcctcatgtgattggcctacctctgtctcccaaagtgctgggattataggcctaagccaccactcccagcctccatttttttttttttttttttttttgagacggagtctcgctctgtcgcccaggctggagtagagtggtgcgatctcggctcactgcaacctccccctcccagttcaagtgattctcctgcctcagcctcccgagtagctgggactacaggagcatgccaccatgcctggctaatttttgtaattttagtagagatggggtttcaccatattggtcaggctggtcttgaacttctgacctcaggtgatccacccacctcagcctcccatagtgctgggattacaggcatgagtcaccacacctagtgcatccattttttgtagctgccagttttctgatgaaattcttaattatttctttatatccttgatacacatgtaaagaatttattttaaagtacatggtctgatgattttatattctggagatcctatgggcctttttcaaagttgtctgtgctttctcttgagttttgttcctgctgtcttatttccttgtttgcttggttgtttttaatttggcaatggaagttgtgtataaaaattgttacaaataattttttttttttgagatggagtctcgctttgttgcccaagctggagtgcaatgatgtgatctcggctcactgcaacctctgcatcccagggttcaattctcctacctcagcctcccaagtagctgggattgcaggcaggtgccagcacgcctggctaatttttgtatttttagtagagatgggttttcaccatgttggtcaggctggtctcagactcctgacctcgtgatctgcccacctcagcctcccaaagtgctgggattacaggcgtgagccactgcgcccagccagaaataatttttaaaaataatttcgagcccaagcatgatggctcatgcttgtaatcccatcactttgggaggctgaggcaggcagattgcttgagcctaggagttcaagatcagcctgcgcaacatggtgaaaccccatctctacaaaaaataaaaaattagctgggtgtggtggtggtgtgtgcctgtagtcccagctgtttgggacgctgaggtgggaggctcacttgagcctgggtgatcgaggctgcagtgagccatgatcctgagactgtactccagcctgggcaacagagtgagatgctgtctcaaataaataaataaataaaaataaaataatttgaggcctagggctctgaaattctgagatctcctttatgcatttgagtgactgagatgatctgaagctggatccagtgctcctgagggctgctttatttctggttgactgtgactcctagagtaagaaacctgcaccccatgtgtggggtattatggcatcccctccctcagccacatgagtaagtcaacagcactgctctagaccaggtgtggtggctcacgcctatagtcccagctactcgggagactgaggcaggaggattgcttcaggccaggaatttgaaaccagccagagcaatatattattaggttggtacaaaagtaattgcggtttttgcctttaaaagtaatggcaaccctgtttcagcaaagtaaaaagcaaaaaaaaaaaaaaaaaaaggaaggaagaattaaaaaaagaatcagctgggcgtggtggctcacgcctctaatcccagcactttgggaggccaaggcgggcagatcatgagatcaggagatcgagaccatcctggctaacacggtgaaaccccatttctactaaaaatacaaaaaattagccgggcgtggtggcaggcgcctgtagtcccagctactcaggaggtggaggcaggagaatggcatgaacccaggaggtggaggttgcagtgagccgagatcatgccactgcactccagcctgggtgacagagtgagactccgtctcaaaaaaaaaaaaaagaatcactgctctgtctctcagcctcctcttccaggattggccgtcgccttgaggggaatgctggccttgcctgtctccagccctgtacctctctgcctcctatgcctttaagcacatgttttctatttgctgggctgtgaaatctgctcttcatctgatggggtttgctttataggtgactagattcttttctcttggtggttttagatttcgcattttcacattgaccttaaatagtctgattatagtttgccacggcaaagaccctttgcattgcattgtttggggatatttgagcctcctctatctggatgtctaatctcttgttagatgtgagtagttttcattattattttattaatgggctggcatgtgggccttggttccaggcgggctcagaggggcagctgcctgatgtctgggcagcttctctttctgtcttttcttacctggactctgggttgcttgttagctgcttctgccagttctgagttttcaaggggagaggggcccagtgatggctgttctttgaaggaaagggaagaatgtctcctgtttaacatgtttctatgtttccagttacttggttagttagttagagccagggtctctcgctctgttgcgcaggctggagtgcaatggcatgatcgtggctcacagcagcctccaccttccaggctcgagcaatgctcccacctcagcctctcaagcagctgggactgcaggtatgtgccaccatgcttggctgcctttttaaattttttttttttaatacagacaaggtctcactatattgcccaggctggtcttaaactcatgggctcaagtgatcctcctgcctcggcctttcaaagtgctgatatcacaggcagggtttccattttttaaagctcccagcagtggtataaactcctcctttccagagaaagcgcactctgtccgcatccctcatgttgtcctctcctgcctctgcttagggttcactccgggggaaagtgccacttgagagtttcctttttatgtgtggttctgactgaccgctccctgctcacagatgctgcttctcagggtggggtccctgaggcctggagtgtggcctctgacgaccttcagggccaggtgcggaatgagagcctgtggccacatggcccccggtgggagacgtcccgccgccctttgcttctctgtgccactctggctgcacagttcagagccttgggaaacgttaaccagtaggacctagaaggggaggtgagaaggggtcaccccccaggtgtgcctgtggtgagccttcgtgctgagcaggtgcagggagggaggcccaggtgcacacacctgtgaagtaggggcagctggctgggctccttgacctgctccagagcttcttattttctggccacttcacctgcagaaggcccaggtggctgtagccgctagggtcccttgcagtggaaatgatgcctgtcctcagcccctctctaggcctggcgctgtgctcagcaccgtcgtgtgtgtgtatgtatatgtgcacgcatgtgaatgtgtgcagacatcatgaggtgtggtccctgctgttaggcagcttgccttgtggctgaagtgaaccatcacctgaatcaagggatggaaacacaaggccagatgcagtggccttctatggagtcagacggtggctccgtgacctggcttcactccagaactacctggggtttctagctgtgcaaatcccaggtcccactcagattatgagtccagttctctgcaggtggaacccaggaaggtgtatttttaacaagatggtactgctcattcacccagcccagccagtggtcttggcatacccaggaaccgctgacatagagcttgtgctccccataaagtgggaaacagagcgttcctgggtgggggacatgtggcttggtcatgacagtcagggtgttacataccaggacagactgtgttcgggtgacattaaggacaagctcctgcaggctagctgcctggatagtgctggctgggggtagaagttagaggggtcacagaggggcttcctcccggccccctcatcagctgcttgatttagggcttggttctgggtccttctgggcctgattctgaaccatgggactggtgtggcctgcaggctcctcccgccacaagctgttcatggtgcagggggagaacagtgtccacaattccccagacagcagctgtggatgccaggcccccaggagttgttactgaagttgctgctggacagctcgcctttcactgagctccacatagcacccgtggtgatgggagccggatggagagagcctgccagcctgcacatcagctcccaactgggcggggcagagggaggagggggtggggaccccaggcagcagggctctgggagcagtggggccctgggttccaggggtgtctggcaggcccctccttactctacgtctctcagcctctggatggaggtgctggccgcagtcgggctctgcctctgactaagggttggggaagtggcgggtgtgggctgctgccccgtggggcctctgaacagaccccagggcctctgccaatcatgactccttcctttcagctggacccacaggccctgcaggacagagactggcagcgcgccgtcatcgccatgaatggggtacgtgtccgtgggactctcctggcgcccacttcccccagaaggatagggtggcctctgttcatttcaaatcagtcagaggtggctgagcctgaggcagcatctgagagggagcctggttggagaagggagggcccccaagagcagaatcaccatgcacgggaatcgtcattcattggctggaatgcagttgccagccaggccctgagcatccctcctcaaacaaaggtctcatggcaccaccaggacaggtggggcctccactcagggacctgggggctgcccatagaaatggagacccctgatttgtctttaggtaccccagaaaggtttaggccttaaaagcaatgacacacccaaaaaggcccgggtataaatggtaaaatgttaatatttgagattcttggctttttcttacattattctgtctttcctacttaatttttaattgttactaagagaaagctggtcacagtacactataatctcagctactctggaggctgaaccaggagaatcactggagcccaagagtttgattacagcctgggcaacattgcaagatcccatatcttaaaaaaaagtaagcaagcaagagaagcagcggggattttaggaggtgcttctgcagaaaccagtcgtttacatcatcttcaacaatcctggctcttgctgaagtagactaggggcttccccgaggggcggctccacctcatgctgagacctctgcatgccttgggggtggaaatatttgatgagactcccaggggtccttgggaccttgggctatgaggaccagaaggattagaggactgtgccccttctccccactgtagatcgaagtaaagctctcggtcaagttcaacagcaggaagttcagcttgaagaggatgccgtcccgaaaacagacaggggtcttcggagtcaagattgctgtggtcaccaagtgagtggggaggggcttgggctcacgcactgagggtgcctgtcccttcagctgtttctgcagaaaagagcatgtgtgggtctctcctctctgtgcgtggccactgcacggtgaggtcaggccccagggaacacggcgtcttcagctacctcctgtgtttcctgcaaaccagctcaggaatgtccttgccaccttgcttggaagcagtaggctggctccaggaactgcccaagtgcagggttttctgcccttgcttggaattagtcacggtcccagattcctgttgaatggttgtaacccctgcccctttgtcacgagtcagttgccaagagaagcctgtttgttggtttgagagcagttcatgcagacatagaccacttcctctgagaattcatttgcctccctaggatggaatctggctgggcctctgaccttgctggtcacgtgggccggggcctccatcagtcataccctggactcctatctgtgtctaaacaccacgccccacccccactcgcatagcactctgggagggctgtgggcatgagcagcgaggactccatcagcagctcccccagataagccctgctaatgagggggcttgcgaagcagctttgatgtgctggtaaatccaggtgcaaaacagaactcaagttaaggcctccgcacagcactgcgttctaactgtgaaggattcttactctagtgtcctgtgtggaggtattggaattgtccattgctaagactcagaggagaaaagcacttagcatcgcaggacttggagcaccggtgctgaggcaacccttcattcattcgtcggatgtgtgttaaggcccaggcccagggcaggggtcagggattctcctctcacacagcacgtgggtggcaggaccaacaccgggtctgacctcccagacgggggcacaggctgctaaccccaggcctggaatctgtcagatgcccttcccgtgctgacttgacttagacaggcctcctgaccttcccgcaaaggtcatgtgtgattcgcaggggttctggccgcttgaaaggttcctgagaaagtacatgccatgaggacagagcttgcagagggaggacaggcatgcagaaggctctgtgtgcagccccagacctgggtaccttcgtcaccgtcctcaccccacctccgggtgtgcacatagggagcaggtctcctgtgttatggcccaagcagggctgttaggacactgagaacattccctcctcccgcaggagagagaggtccaaggtgccctacatcgtgcgccagtgtgtggaggagatcgagcgccgaggcatggaggaggtgggcatctaccgcatgtctggggtggccacggacatccaggcactgaaggcaggcttcaacgtcagtgagtgtcggcctgcgcaggacgggatggaggtgtgggcagtggtgtccgcgatgagatctcagagtgctccatggcccaggcatgtcacatccttctctgtgtcttttcttcatttactgttttattattttaaaaaaagagaaaacaagagttgtacaaacagcttctatagaagccagtttttacaccatcgtacccactcatgccacttggtggagtggaccaggggcttctgtggggacttggccttcctgccttgggggtggacaggaggtggaagcccaggactcagtgcggtctgtccactgccctgtatgaggatgtggtgggcagagggcactgatgaaattcagcgcaggccggggctgcagcatctccgcctccatctcaccaaccctcacaggctttgaaggacccagactggcctcaaatgccaggggagggcactgagaccccagagggtccctcccagcatcttcaaagcaacaggattttgtgcctgcaggcccttctttgcagcacacaccacccaccctgaccaggacccctagaatgcccagcatccctgggagggccctgtggtagtttcagctccctctgggggcccagaatgaacctggcctgtggtgaggatgtaagcaccaatggccaattgggtccaaaggaagacaccggttcaaacactgaaaccaatcagattctcccacggccttcctgctatcagacgacactggtgcaggggtggttgctatgtacagggcagagccacccaatccccacgcaggcgctgtgtcctgccatgctggcctcctcctggccatcacatcaggccaagcaggggagaggaatgggaatgcccacgcacccctatcaactctgcagacacagaaccatgcacagctcttgggaggagtcagatgagctgctcaaagcccaggagggacccgcacagtggtcagtgtggcagggacggtgctttagccaaggcagggatggcgggtgactcactcaggatcttcaaggaggccgctgcatttccatgctctttccagataacaaggacgtgtcggtgatgatgagcgagatggacgtgaacgccatcgcaggcatgctgaagctgtacttccgtgagctgcccgagccccttttcactgacgagttctaccccaacttcacagagggcatcggtgagcactggaggccttggcctcgtgggagatgtctcccccatgtgcactgctgccctcggaggctgtgaaaagcgaggtgtgggaacctgagttgtaacccctctgccatggtcggcattttaacccaacctcaaaaagcaggggaccagaaccgagcctgtcctggaaggccttgcccatccccagagggctccccatccctattcctcaaggaggccaagtgggtgaaatggtcagcactgccgtgctgtggggtcctaaagtctgctgtcctccttcctgcagaccagggctaaacactggtgcccaggtgctcttgccatgggtcctggtccagccaagcatggtttcaaacatgacctgacccttagtcaacctggaggctgatgtctagagtgggcgctggagcgtgcagcacctgtggcctctgcatcacccttagggcaggtctgcctcccgggcccatgcacagaggacctggtctcccagcctgcaggtgcccctgtggtgtccaggacgacgagggggtctctgcgtacttggtggggctgggaccctcccacttcccacctccttgtgtccctcactccgctgtttcattccatgctgagcctcccctgccttgggctccctggggagggggtggtggcaggagttgcccaagggctgctctgcccatgagcagctgctctagcggctcctcctgctgctgttcgccaggtgctgctgacccctgcgaggtagagaaaaggcgttcaggtggttcacaccccacacaggtgcccctcacagggtcctcactggcggccagcgctgtgggtgtgacgatgatgacaagcctaaactgcgcaaggactcgtgtcccgggcgctccatgtgaccacctcgggagaggtctccggcttgtcgtaacccaggggagtgacccactgcctcctgcagctctttcagacccagttgcaaagaagagctgcatgctcaacctgctgtcgtccctgccggaggccaacctgctcaccttccttttccttctagaccacctggaaaggtagcccagctctcttgtggctgcccaggactccaggtctccaggccgttggggtgcccctctgctcccaccagacccccagcaccaaggaccttttcccccgacccctgtctgcagtaactcactgcttctaaggactagcaccactgccacccctgcccctgcctctcctctttgccacccgcctccctctgcactgtggccttaacaaagagctcagagctttggccgtggccagcagtgcatttggaccgcccccacttccctcccaagcacatcatgaagacctccccatcagcccagagctggccccttgtcccgggccactgagacccagaagtaccaaggctggagtcagcttgcagcacagccagggtcgaggtcactccctccctgaggactctagcatggcacagcccctctgcctctctcctggtggtggcgttgaaacagcaccctctgcttcggtcctctacagggtggcagagaaggaggcagtcaataagatgtccctgcacaaccttggcacggtgtttggccccacgctgctctggccctccgagaaggagagcaagctccctgccaaccccagccagcccatcaccatgactgacagcaggtccttggaggtcatgtcccaggtatgggaagacagcctccagcccatgcaaccccagcctgacagaggtggcctctgcctgccccacccccagtcctgcccatcttcccacttgcattgtatgtggtggtggctgagattcagagagagggacttgcctaggtttgcatggatgggagtgatagggggtgcccaggccacctcctggtcctgctggtgcatcttgctgggggcttaaaaccaccccaagtgttcgggtgtggtggctcatgcctgtaatcccagcactttgggaggccaaggcaggacaaccgaacccaggtgtttgagatcagtctgggcaatgcagcaaaccccatctccagaaaaaatagaaagaaaaattagtcaggcattgtggcacacatctgtaatcctaggtatctgggaggctgacacaggaggattgcttgagcccaggagttagaggctgcagtgatccatgatggagccactgtactccagcctgggggacagagcaaggccctgtgcatctctaaaataaataaccaccccccacccaacaagtcatgccttgtcaggaccccaccccacccccgtctcactgtaaggggttcatgacaccagcaggggtttctagcacctgaggtggacttgggggcttgggccccaaagacctccccaccagcagctgtgagcccccctctgagccactctcctcttccccactctgcgagggcaggtcgaggtgctgctgtacttcttgcggctggaggccatccctgccctggacagcaagagacagagcatcctgttctccaccgatgtctaaaggtcccagtccatctcctggaggcggacagatggcctggaaacctctggctaatcgggccatctgtagagtgggaatcaagattttctgaggcatccttgggccacccccaggtgtcaggccatctgccaagagacagtggcccaaagcagaaggacaggtggcctgggcagatcccgcccaggtctgaaagccccaggctggcctcagactgtgggttttttatgtggccacccgagggcgccccaagccagttcatcttggagtccaggcctggccctgggagacagggtgaaagcagtggtttttatgaacttaacttatagagtctaaaagatttctactgaatcacttgtcaagaagcgccctctctggggagaagggaacgtgaccggattccctcactgttgtatcttgaataaatgctgctgcttcatcctgtgggggccgtggccctgtccctgtgtgggtggggcctcttccatttccctgacttagaaaccacactccacttagaacagggtttgagaggcttagtcagcactgggtagcgttttgactccattcttggcttgcttctttttctttccagaaggatttttgtgcagaaatgggtcttttgttgccgtgttagtcctccttggaaagcagctcagaaggcccgtgaaatgtcgggggacaggacccccagggagggaatcccaggctacgcaccttagggttcgttctccagggagagcgacctcgtcccccgatcctgaccgcccttccggcccacgctctcctgtttggcttccacaggcctggacttctctggcttctctgcccacacactccctgcccccagtgtccctgcccctgccccagcacaggtgacttcatttctgtcctctcagctcagtggactcgctcaacttttgtataagtctccacttggtggtagcagcttgctgatgacttgttttaaaactttcatcctaaataaccttttgatgcttgaatatttttaagttttatacatagtttctaatttttttcccagcagatccagatacctaataagatgctggaatgtaatccctggacaatccgtgtcctggcagcatttggtcttcctctaagcgcctggctccgctgttctcaggagtgggttctgaagtctctggagaacaggatacgtggagggttaggaaggggccaggcctagagacgggagactccctcccggagcaggtggaggcacaggaccattcgctaccccatctgccgacagctgcgggggagcccaggcattctttgtaagccctcctgactacctgactcaaagaaaacagaagcatggaggccgccaagtattttcaagaaataaccccatgaatattccatcacttttttagaaagaggggcttggggcaggcagaggagagaagggagagcaaactgagagccaagtttccagacagtcctgcaggaggagaggatgcagctccccagagggaagcaggatcacatttaaggaagtgtgtggggtccctggatgacaccagcacccagtgcggctctgtctggcaaccgctcccaaggtggcaggagtgggtgtcccctgtgtgtcagtgggcagctcctgctgaacccgcagctcactggggagcctgacagtggggccatgcgcctgacactcctctctgcttgtggacctggcaaggcagggagcagaaaacagagccccttgaaggcttcctgtctgcgtctgtgtgcagtgtggatttagttgtgctttttacttgctgggagagcacagccaccatttacaagcagtgtcaccctcgtgggtggcgaggacagaacaggagcctctgctctctgtacctatctgggcccggtgggctcccttgtcctggcttccatctctgtctcagcgaccattcagccctgcgcaggaacacatgttgcttagaaaagccaaatccagccttgtctctgcctcctctggtctcatgatgtgcatctgttaccttgaaactggaaaccagtctatcaatgtctgtgccaattttttattccctccccaacctccttccccatacgactttttatttatgtaggatgtgtgctgtctaatgatgggatgaccacacttttccatgttctaaaagtgctcctctcccgcagggtcccagggctggtggttgctttgggtctacagctacgtcttacccgcctcctgcctcaacagcctgtgtggtggcaaagccggtgtggggctggggaacgcagcgttctccaggagggggacccggctctccttctgcagtgcaggcaaaggcctagatgccagtgtgacctcccacaaggcgtggcttccagactccccggccggaagtgatccttttttgccgcgggccctgagtttgaagcagcctggctttctcttggtaagtggctggtgtcttagcagctgcaatctgagctcagccacctacacaccaccgtggccgacactttcattaaaaagtttcctgagacgacttgcgtgcatgttgacttcatgatcagcgccgctgggaagaacccctgagccggtggggtggggctggaagcagcaggtgcagtgatggggctgggtgcccaggaggcctcagtgctcaatcaggccaaggtggccaagcccaggctgcagggaaggccggcctggggggtgtgggtgagcacaggcaggcaccagctgggcagtgttaggatgctggagcagcatccgtaaccccactgagtggggtagtctggttggggcagggaccgctgttgctttggcagagagagatgatccccactggggagaggctgttctgactctgcaggtgggacagggacagatggccaccagggtgacccggctggtcttcctttgctatgctaagccctgggacgtggaggattcctgccacacagcctgggcccggtttcttacctgtggccaccgctctggcacgagcccctcagtcttgggtggtttctgcctggtccgggatttggtgttcctgctgagtccagcctttctgccacctccgcatgggccgtgggtggtgttgtcagctgcctcccaccttggcttcagtagctcacccagctcacaggggagctgccctgggctggagatgggcatgcaccctgggtcctacttgaatgaatgcagcttgaggagagccggccatatacactgggccacaggttaccctcggcaatgcccacatcagccgtcagcctgagcctccccaggagagcaaggctcacacgacaaaggctgcccgtggccaatgaggtggctgagcccagccaggacctttctcggactcccgggatgtggctctgctcgtgagctgcctggtcagctctctcggggtgagaggggcttgtcacacgggcccctgcctgcagtgtgacccttctcagcttctctcagcagccctgcctgcggagtgtcaccgccaccatgatcatttccctgacactgcgagggtgtggggacgtcctgggtagagacagggcccgtggcagcagcaggctcaggggcgccctacactggtgggctggggacctggtggagaccacgccaagggctggacaaggggacgagcctccaccctggcctctccgcaggcctcagcagcccctcccacaggcagaagggttgacactgggttctgccctcactgcaagagctgcaagtgccacgtgctgttctgcccaatctggtgtctgcaggtgaggaaagggctgccgctggcccgtttctgagtgttcagcacctaaggatgacagcactgtctgtccctaccctccgggtcctgtttgaaaatcaaacccatgctcacaggccaatttttttttcttttagagacagggtctcactttgtcacccaagctggagtgcagtggtgcgattatagctcaatgcagcctccaattcccggactcaagggaccttcctgcctcagcctgccaagtagcttggactatagctgtgtgttttcttattattttgtagacatggggtctggctatgttgtccaggctattctcaaaattcccggcctcaagcaatcctcccgcctcggcctctcaaaggttgggattacaggtgtgaggcaaggcacccagctcagccacagagccctattgcatctctcttactaggagcaagagctgactgccccctcatccccattccagagtgttggggctgtgttcagccgaggccgggccactggcatggcccagggagcgggatcattcactgctgccccaaatctgagatcattccaccttgacaagacttcctcatccaatccctttacttgacagctggggaaaccaatgcgcacagagcacccccagctcactcggggtctcagagctgatccatgagcggaggctgagatcctgggatcttgtcccccagcctccctgcaaccttaatcccgttctgctgaaagagatggggccggacctcgaccagcagccctggcctggacatgactgtgctcatgcaggtattgaggccgagatgccccggcatcatatgtttttctattttcttttttttttttttgagacggtgtctcactctgtcacccaagctggagtgcagtggcatgatattggctcactgcaacctctgcctcccggttaaagtgattctcctgcctcagccttccaagtagctgggcctacaggcttgtaccaccacacctgactaatttgtgcatttttactagagacggggtttccccatgttggccaggctcgtgtcgaactcctgacctcaagtgatccacctgccttggcctcccaaagtgccaggattacaggcatgagccatggcgtcacttaaatgtagtgagaggccgggcacagtggctcatgcctgtaatcccagtactttgagaggacgaggctgtcagatcacctaaggtcaggagttcgagaccagcctggccaacatggtgaaaccgtgtctctaaaaaaaaatagaaaaaaatagccctgcatggtggtgagtacctgtagtcccagttactcaggaggctgaggcatgagaatcgcttaaacctcggaggcggaggctgcagtgagctgagatggcgccactgcactccagcctgggtgacagagcaagactttgtctctaaataattaaataaataaatatggctgagcatggtgccttaggcctgtaatcccaacactttgggaggctgaggcaggtggttcatgaggtcaggagcccgagaccagcctggccaagatggtgaaacactgtctctactaaaaatacaaaaattagccagctgtggtggcaggcacctgtaatcccagctacttgggacactgaggcaggagaatcacttgaaactggaagtcagaggttgcagggagccgagattgcaccactgcactctagcctgggcgatggagaaagactccatctcaaataaataaattaataaatacagagcaagattccatcttaaataaataaataaataaacatacacctgtaatcctagcagttcgggaggctaagacaggtcgatcacctgaggtcaggagttcgagaccagcctgaccaatatggcaaaactccatctctactaaaaatacaaaaattagccaggcgttttgatgtgtgcctgtagtcccagctacttgggaggctgagacaggagaattgcttgaacccaagaggtggaggttgcagtgagccgagatctcggctgcacttcagcctgggtgacagagtgagactgtctcaaaaggaataaaaaaaatacaaaataaaaaaaatgtagtaagatggcagagtcgtgccgcggaagcgtgctggtcctatccatgtagtgaaggctgatttcatacagaaatgtcacaagaactttttttctttttctttttttttgagacggagtctcgctctgtcacccaggctggagtgcagtggcgcgatctcagctcactgcaagctctgcctcccgggtttatgccgttctcctgcctcagcctcccaagtagctgggactacaggcctgtgcagcagatgcaggggggccactaggcccaggcagtcttgggacttgtgtgtctcctgctgtgcatccatactgggtgctttagaaacggcaggcagaccagaagcccctgttgcaagtgaggacaaagtgtgggaaggccgtgagggtctgcagtccgagatggcctggtcctcaacctgcagtgcactgttgatgcactggaatgccgcctccttctcccagtccaggtcttcagcagtgacccggtaccccagctctaagggaggtggcagcatcaaaggctcccctcgcctgcgtggcagcaggggaaacttgcatctacggggcctagaggcctgggatatgggggagccacccctgggagcgagtgtctgccctggtgctgtatctgccgtcttttcacactgggtgtgacccgaagagacagcctgaggtccgtcctcactcactgtgtttgaggaactgagggtcagctggcagtgggatgaggctggcccctcttccactttcgttccgggaggcctcccgtagagctgtaggggctcgagatggcatttcatttggggcacgagctggtccgggaggtctgcgatctctggttctgacctctgggcacctgctgcagctgtggctgaggcccagaaatgtgaagggcctccatccactccagtagtgaccccaacgtggggttcaatgcggaggggggaggggctgctgcggcagctgcaggagcagaagtgccacgccttgttcttctcatgcccgcatccatgcttgcagctgggaagggggcaggaatcagcgaggtgacctgggctgagtcctgggaatgggaagaggtggcaggaaggggatctgaggaggagaacagggggcctggtggtctgtgcttcttcccagacatgggagctgtagaggggacctctgcagcagatgctaagggggccagtaggcccaggcagtcttgggacttgtgtgtctcctgctgtgcatccatactgggtgctttagaaacggcaggcagaccagaagcccctgttgcaagtgaggacaaagtgtgggaaggccgtgagggtctgcagtccgagatggccttgtcctcaacttgcagtgcactgttgatgcgctggaatgccgcctccttctcccggtcaaggtcttcaacagtgacccggtaccccagctctaagggaggtggcagcatcaaaggctcccctcgcctgcatggcagcaggggaaacttgtgtgtactgggcctagaggcctcggatgtggaggagtcattcctgagggtgagtgtctgccctggtgctatatctgctgccttttcacactgggtgtgacctgaagagacagcctgaggcctgtcctcactcactgtctttgaggaactgagggtcagctggcagtgggatgaggctggccccctcctccgctttagccccggcaagcctcccgtggagctgtaggagctggagatggcatttcggttggtgcaggagctcgtccaggaggtctgggatgtctggttatatctgatttctgacctctgggcatggaggtctgtctgcagaggcccgggcccgggcacaaagggagagaggcctccattgtcccgcaggggccgaaatgcagacggtgcatccccggtgacctccgggacccttctctgatcaccaggattctcttggactctagggtccttgtcctgctcaggcatccctgccccgctctccttgagggccctcaacactatcttccctggacacaagtctggggacagccgggtgttgtggaccccaaaggggtgactcccggctcctgggccccacagagagtccatgttctcagtgcagtggctgagctggaggacgccctggaactcggagcacacagcactggcttgctgtggtacctgtgcaatcaaattgaaggcaggatcccaggaaggaacgcagcgcttgcaggatcaccgaaaaccttcttagagttgtcttgacaccactgatgtcaagtgtctgggtacttgtaggatggcctgccactcagtgcacgggcaggagcaacggggagatcccacaggcaaagtgaactgggggatgggctgaacgggctccaggcaactgagccctactggcaggtcctcggcctgggcccgaacaggaaggaggggcacagagtgcccaggtaaccgctcctgggagcagtggggaaccgtcggttgcttgaactctcgagagctgggctctgagcgtcctcgtccagccgccaactcggccaacggctaagccagcagtttcttctgttgccgggcaacgcgccttttaaacctgagggagcgggcgcgtgagcacatcacggcgcccgtgacagagccagcttaacggattaataagcgcagccaggtacccgcgcgaggcacttgctggcaatggcgggaggcggacgtggggggtcatgcaataggtactggaaggagagaggcgggcacaaaggtcgcgggaggaacaggtgcccacaatggcggcagatctgcccgtggatcactgaagattcctgctctcctgctgaggtggagattgcagtgagctgagatcgcaccattgcactccagcctgggcaacagagtcagactctctctttttttttttttttttttttttttgagatggagtctccctctgtcgcccaggctggattccagtggcctgatctctgggctcaccgcaagctccgcctaccgggttcacgccattctcctgcctcagcctctggagtagttgggactacaggcgcccgccaccacacccggctaattttttgtatttttagtagagacggggtttcaccgtgttagccaggatgatctccatctcctgacgtcatgatccgccctcccaaagtgctggcattacaggcctcggcctcccaaagtgctgggattacaggcgtgagccaccgcgcccggtgttgaaactcccttgaggcattttcttcggccttcgggtccatcctctgtctcctccttgacctcctcatctcctcctcgccactgccttggggaccttggccaggctcatggcatccagcagccactcaatgtcaatacctccatgttcatctctcagcccgcccttgcccgtgaacccatgcttatttatttattttttttatacgtgcacccatgctcttcaggtctgatgaagtatccaaaatcaagctcctgaccatcctcaaacctgccccttctgcagggtttacctcgctagtcggcgccatccttgattcttctctttctcccacccaggccatcatctcttgcctggttgatacccacagcctcccctttgggctttatccttatccccgtcatagctgccagagggaccctgtgaaaacactccccagcctgctcattcttctgccctaagcctgcatggcacagagcaaaagccagttgttatgggacctaggaggtcctgtgggatgggccccagcctgcatcttcatcctcttctccccaccccactccattcactctctgcctatcgctcaccagcctataccacctgcctcagggcctttgcactgaccatttaggcaacattccaggctcttttcacacgttgcctcctctgagaagccctccctgaccactctgcccatacctcatgcctcttgattccccttacctggcttgtggtttcagcactttccctgtgtgtgtttgtttttcttggcatgagggcaggacctaagtgtctgttccctgttgattccccagttccaggcatgcagtgcaaattctagaaatattttttgcatgaaggaatgagtgattgaatgcagcaagggtctggaggctgaggaccaggcagacagacattcagagttgctggaatgcgacagagacagggagtcagactggtcatgcaagatcctgggcctgcccttgggtcctggggagccacggaaggttgtgggtgccagagggttgtggtcagagccacagtcaggggccttctgagacctgtgtcccctccccaccctccctccccacctcctcaggccagctctggggtctcggcaggtggtccacaacatgacctctgagttcttcgctgcccagctccgggcccagatctctgacgacaccactcacccgatctcctactacaagcccgagttctacacgccggttgatgggggcactgctcacctgtctgtcgtcgcagaggacggcagtgctgtgtccgccaccagcaccatcaacctctagtaggggctgctgggccgcctgggtgggaaagggccaggggcgggtggcccagggactgcccacttatccagtaaggtggctccatcacctcttttcctggtgggaaactgaggcccaaccttggtagcttatcctgggcctctcagtgagtatgtttgagcctcagtgggtggatagggaccaggctgggccaggcaaggtcaggtgctgtctgacctggctgggcggtagctttggctccaaggtccgctccccggtcagcgagatcctgttcaatgatgaaatggatgacttcagctctcccaacatcaccaacgagtttggggtgcccccctcacctgccaatttcatccagccaggtatggggtggaggtctggggatgggggactggggtggagaggggcgggtgtcctgggcaggcagctgacgggcatccctgtcttctcccatcggccacagggaagcagccgctctcgtcaatgtgcccgacgatcatggtgggccaggacggccaggtccggatggtggtgggagctgctgggggcacacagatcaccacagccactgcactgatatgtgtcaccccttttctccctggccgtgcccaccctgcacagcccccaagccatgctgatcacactcccatgccccaggccatcatctacaacctctggttcggctatgacgtgaagcgggccgtggaggagccccggctgcacaaccagcttctgcccaacgtcacgacagtggagagaaacattgaccaggtgggccgggggttggagaaactgagtcacggtgtggggccccagggcatcctgggctggaggcctggatcatcacagagtggacaattgttggtgtcctctctctagtgcctgggccatctggagcccctgtgccatgagggccaagccccctgctccagtgagacccagcaggccccaacctgctcttcctgatgacctggcccgaaatggcaccacctgggctgaggcctgtgaccacacaggtgtggttcaggtggcatctggagccctgctcaggcttcccctctcctcccacccccaggcagtgactgcagccctggagacccggcaccatcacacccagatcgcgtccaccttcatcgctgtggtgcaagccatcgtccgcacggctggtggctgggcagctgcctcggactccaggaaaggcggggagcctgccggctactgagtgctccaggaggacaaggctgacaagcaatccagggacaagatactcaccaggaccaggaaggggactctgggggactggcttcccctgtgagcagcagagcagcacaataaatgaggccactgtgccaggctccaggtggcctccctgccctgtctccccactctctgggcctcagtgtattgtgtgtgaaatggagccatctgactggggaggaacagagaggtgggattcggagatcttcacaatgcggacactggaactagcctcagcatcttcagcatggggagagccaggcacatggctgggggccaggggaaggttcacaccaagccctgcccctttccaccctgatccctcggactttggggccaggccctcccttactggggctgggcagtgacactacctaggatcagccaccagggggtgccacgaccctggcactttcttaggcagagggtggccagctgatgctgggaacccgggcgccttctcagacccgtaggcgtccagctcaccctgccgatgacactggaggtgaagctgaggtccgaggaatggggactgggcaacaggctggaggaaaacatctcggtcagagccacgcccctggggggtttccaagagcaagcccagagtgaaacccaagcttgtgatcctctccagagggaggcctggttctcagggaacagcaaacgggaagatgtccccagatcccagggatcagggcttggaccagccggggacgcagcccagagggagtgggtccagaaggaaacagctagacacagcagccttcaccatccgcagcccctccaggcctccctcggggcctgctccctcctctgtgcacagttccaacacctggggcagggttctgggaagggctggtggaggtgggctggtgggaggcggtgatcacagcccagcacctggatatcaccaggggcactggggccaggggccaggtgaggccaggtcggggctatccttcaggagccccgaaaacctggtgattccaaagggcccatagacaaacaggtttttatgcctgtggagtcaagtcccactgggtctgagctctgcagggctgtgtctctggggctctgcaggggtgagatggaggtgggctcaaatggtgtacaagtcactcctcaatccttattttatttatttaatttttttaaaaaaaatttaaaccaatagagatggggactcactatgttgaccaggctggtcttaactcctgacttcaagcagtccccccatctcagtctcccaaaatgctaaaattacaggggtgagccagtgcacccagcctcaatccttattttggcctgagaggaaaggccgtggccccatttgcaggggagaagactgaagctggaggggcaggccttgctctgggttgcacagcagcaagagaagtgggagctggccacgaggcttcctcgactcgacacactggtggggtacaccctggttctccaggtcccatggggctcagcccaggactacctcggggggtgaggtacttaaatcctctccttcattctcatcgccctttcccccatcatttcctgaggaagaacattcagggacctgaaggggtggcctgcccctccacatctgtgggtgtttctcatcaggtgggacaagagactgagaaaagaaagagacacagagacaaagtatagagaaagaaaagtgggcccaggggacctgcgctcagcatacggaggccccacgctggcaccagtctctgagttccctagtatttattgatcattatctctaccatctcagagagggggatgtggcaggacaatatggtaatagtggggagagggtcagcaggaaaacatgtgaacaaatgtctctgtgtcataaacaaggttaagaaaaaggtgctgtgctttgatgtgcatatacataaacatctcaatgcattaaagagcagtattgccaccagcatgtcccacctccagccctaaggcagttttctcctatctcagtagatggaatatacaattgggttttacaccgagacattcctttgcccagggacgatcaggagagagatgccttcctcttatctcaactgcaaagaggccttccttcctcttatactaatcctcctcagcacagaccctttacgggtgtcgggctgggggacggtcaggtctttcccttcccacgaggccatatttcagactgtcacatggagagaaaccttggacaatacctggctttcctaggcagaggtccctgcggccttctgcagtgttttgtgtccctgcttacttgagattagggagtggtgatgactcttaacaagcatgctgccttcaagcatttgtttaacaaagcacatcctgcacagccctgaatccattaaaccttgagtcgacacagtacatgtttctgtgagcacagggttggggctagggttacagattaacggcatctcaaggcaaaagaatttttcttactacacaacaaaatggagcctcttacgtctacttctttctacatagacacagtaacagtctgatatctctttcttttccccacagggaccttcctggctgtgcctcgggtcaggaccagaatgacacccattcatttccctgggcctttgctccggtggtccctgcaccctggcctctgcctgacgaggatggtggggagaggaggggggacgtcccccacactgctgtctccactgttcctgctgcccaggcctctgggcttccaggactacagcgggtgggtgggtgggctggcctgagcccaggaatgcacttcagttcctggttgagcaatgtcactgaggcttgggagtcgggtgggggcgggaggaggcgtccacaggccccccctaccgtgagaggcagccgtgggaacagcctacctctaaacaatcactgcagcccaggctgaccaggggctctggccggacataggggcctggcaggctgtgtgccctgtaaggacacagtctgtctctgtgcctcagtttctctgctgcccagatggaggggcccagactccaggtgtacacatctggagcaggcagtgttcagttggggaggaagcggggaggactgtgggggccatgtgggaaggattccaccccacatcacctgcacccctgctgagcctggtcaacggagcccctcagtgggtcctcactctcctggctgcctcccatttaggcaccctgaggcctggggagaacagagccaggccagtgtccctagagaggctgcgctgccagcacagtagtagcggatttggattcagggaagcagacctgcagccagggtgggaaagagctgcaggcggggtggagcccccacatggcacagcccccctccctggaggtccatgctgcatttccaggacagcaagtcccagggatggatggtgcctggtgccaagggctagaggcatggtctgtctgcattccctacaggggcatcttgtagtcaccagcatttgatgctgtcaagtccccctgtcctctgtgcagactgggaagcccttggtcaccctggggggtggggggacccaggccaggctgcagaagcataaggacttgaacccgggtcctgagtgacaccaccttgggtcctcctccctctgcctctgttcagctccaccttgatgctgactaggctgggccatgcggagagggttaggggatagagatgagagctggggagcagggctccactctgggaggggggcagccttgcgggatccagggcagagttaagcggccccagctccgctttcctagagctgctgagaacccgggaaatggtgtggaggttccggggagccctgcccctacctggcaaccgcagtgcaacaggcaccaagttctcctgcacattgcgacagtgggaccctgggctctggcgggcggtaggtggggcctttggacctaccagcagtgagggagttaacacagcagctgacttctctaggcaaggaaaactcccctcagacgctttgctgcctggcctcctgccagcaacaagcaggagctgaaaactagaagctgaggcatgagtttggtcactccgtagtgtgcacttggtgagggcagcagctggccacagctgccagccgtctgtccattcgcccatctgtccatctggcagcccgctgttcagacctgtctgtctgtccgcccatctgtaagcccatctctgtcccattgtctatctgaccatctttctcttactgtcctctttgtctagctatctggcctgtctgtcgatccatcttcgtgtctgtcttcagcccccacctgtttgtccatctgtccaattacctgtgagtctatctatgcatcttcttgtccattcatctgcccacccatctgtccctccgtctgcccaccggcctcccctctccttctgggccgcagagccacggcccaggactgcagagccatggttggcctggtcctgctggggctggggctggcgctggctgtcattgtgctggctgtggtcctctctcgacaccaggccccatttgacccccggcctttgcccacgccgctgttgctgctgactccaaggtctgctcggatattggacagtgagtgagatgtgggaggaagctgggtggcccttggcagccagcccctcctggagaaggcgtgtgtgtgtaagcgtgtgtgtgtgtgagagattatgtgtgtgtgtgtgggtatgtgagtgtgagtgtggggtgtgggtgtgtgtaaatgtgtgtgatcgtgtttgggtgtgtgtatgtgtgagtgtgtgggtgtgtgggggtatgtgagtgtgagtgtgtggggggtgtgggggggtgtgaatgtgtgtgattgtgttttgctgtgtgagagtgtgtgtgactatgagtgtgtgagtgtgtgttggtgtgtgggtgtgtgtaaatgtgtgtgattgtgtgtgtgagtgtatgtgtgggtgtttgtgggtgtgtgtgagtgtgtgagtgtgagtatgggggtgtgggtgtgtgtgaatgtgtgtgattgtgtgtgggtatgtgtatgtgtgggtgtgtgtgtgcatgtgtgtgtgtgtgcgcgcacgtgcactggcccaggaagcaggagccgtgtgtgtgggcttcagcacctgcaggacttgagcgcaaggagacagcctcagggcccttgcacagaacaggtggcagggtgtgcccgtggggcagatggggacttggggacaatggtggtgtgtgagtccatacctggctccaggattcaggaggcccatttgcatatcccaggtgggaacctgtctggccccggctgaccctgctggccggtgcaggccccttcagtgaggccaattctccaaggctgcggtcttctcccagggtcatgggtgaaggggtttggaggctccctgcgtgggtactggcctgctggggtacacacaatgctgccatagccagtctgcccctacacccagcccggggccacatctcaggtctctcagtcctgaggagcccggtgccccacccctcacatcctctctccctgagtcagggcctgggtctcgtgagctgagtgactgatacttggtgtcctggatgagggcgtggtggagaggggccacagcgggtgtttcctgaccctcttccaggaaggtgctgctgccgctgcagggaggacacatacaggatgccccttcctgccccctgcctcccattgggcccacaaaagccagggcaagcctcccctccctgccagccacctggtctgcttcccagaaattctgtcttgcaggctgttgggaggatcccagtactttgtaaactaaagcaagggaggagtggccgttctctctctttgctcattcattcaccttttcattcattccttcttccctccattcccccatctgtccatccttccctgccctgattgctcatgccaccccccctccagcccctcctgacctggtcctttggtttctcttcagggctttctgtctcctcccacagggctgagaatggcagctcagggacaagtgggggctggggactgcttagtctccccagtggctctcaggggatttgagggtttgacgccagctgccaccccaggctgtgcccctcctctgctcaggaggacatgcagagatgcgacacccacttaaactcgaagttgcaaagatgcaaatgagactggggtctcaggcaccagagaccacccatgggcacgtggcttttgggagtggggacctgctgccacagatctctgaagagtctggacctgctgggtctccccgagtgactgtctgggggtctccatagcatgccctgctgtgtgcgcgacggtcactggttgggtaggggtctctactctaaagctccctctgccggcatcccctcgaactctcccttggtgaagagaggatgtggttttcccccagtgttttatcaaacaactctctccacttcctgttttaagaagctgggagtggaagagagcctggggctggccccagctgctgctgcgaaacaggggtcactggacgctgggaccctggccgggctggctggaggcctcaggaagaggcctgctacagtgtcatcctggccaagattcctccctgcagaggaccctggccacactgccacagggtctgctggggccaccagaagcccatgctcctgcctccatctctcccctttgtgctcacctctcaccaggaggccctcccagagttcagtctcctgcttttctttttttttttttttgagatggtgtctcgctctgtcaccaggctggagtgcagtggtgcgacctcagctcactgcaacctctgcttcgttggttcaaatgattctcctgcctcagcctcctgagtagctgggactacaggtgccagccaccacgcccagctaatttttgtatttttagtagagacggggtttcaccatgttggccaggatggtctctatctcttgattcgcccgccttggcctcccaaagtgctggcattacaggagtgagtcatggcacccggcctcatctcctactctttcagcaccaggttttattcttgggattctgctacagccgcagcccctgggtgcgagctcctaagctttctgcgagtgtggacccagcaccgtgcctagtagacatacaaaaggaacatggtgacagtgaggtctgtcatctccagcataatgactcttttgatccttgtaaaaaaggtgatttttggctgggtgtggtggctcacacctgtaatcccagcactttgggaggctgaggggggtggctcacttgaagtcaggagttggagaccagcctgggcaacatggtgaaaccacgttctcctgggtgtccaggtggtccaagaccccatgactatatcatgacaggaaagagagagttaataaatctgagggcataaaatgtgaacatatactgtttccatcccacatgaaggcacatgtgtctgagcctactctctgggaggaatagagatctcagtttccacatcagggttgcattctatgcacctgcagccatgttattctgctgtagcagatgctacacttggcaccgacattgcagatgggaccatgaccttactggagttgtagaaatctactttcaccttccagaatccatttaatgtttataggagctagtccaagaaattagatggaaataaagtcctgctacaacctgagaatctttaggcctttaaaggtaacactattacatgcaactcccaatgaagggtgaagcatgattattatttaccttttttgatggggtgaaatggggagagagtcggaattcatcacatacataaaaggcaggtcgtataaatgttagtgtttgtgagtcacaaggtctgtcttgcagcgactcagatctgcacttgtggcatgaaagcagccattgactgaacataaatgaagggatatgggtttgtttaatgaaactttatgtacaaacgtaggtagtcactatggtttgctgaccccagcttttccattgccccatggaactttctttgggatgcctttttgcagtgggttctaggtgagaaaaattggctcggatctggatgctgaagttgagactggtgctgtcatgtggctactgccctcgtccatcctgggtgacttctgactgttgtgatgagcagggccctttgtggctgcctagctcctggtgccaagaatgatgaaccctctgcattgccctctgcaaagcagaccacaggacagccaccctgaattgctcgttctcactgtgtccaccttgcctaagatggttgggcacattcactggctggttaattccagatagtgttatctcattaatgccaggcagtaccttctagaagaggctcctaccatctgcactagactatggagcttctccggggtgctagtgctctgtcacctgaatatgcttcagggatttgctaaacagaatgtccttcaggccctcccatagaacacagggaaacattttgttttcccttgtgtgactgcaaaagggaaaacaaaaataagcctgggaaagggtgatttaggactttgatgatgtcgaggctgggaactcccatcagagtttctatatatgatggggaggggccaattttttgaaagtcagcattgactggccattggacacaggtggccctacattgactctctcttgcccaggacctctcctcaaaaagtctcaggtgattcagccccacagcagcaggggcacgacaccttctgtcctgaaggctgataaccggtgatgtggacagctgccattcactctggggaagatgctgcctaattccacacccaccgcctgcatgtctagtgagagcctgcctattcctatggggacaccccaaaattagctccaccaagaagcctcctccacctccattctccacagaagacactcatcttatatgcttggctacaggtcctgtttgctctgctattatccctatcacctgtccctgtctgttcaattgtctcacatgagcagagagacgatgtctcattcagccttatttcccatgggtattaataaatattcattgagtcaattaaaaattcatgtaataacctatcaatgcatgtctctgtgtgaggtaaagaaagcatcctgattgtaaatataactctcatgttaaaagctgggagcagtggctcatacctgtaataccagcactttgggaggctgaggagggtgaattacctgaagtcaggagtttgagaccagcctgatcaatatggtgaaaccccatctctactaaaaatacaaaaattagcagggcatggtggcgtgtgcttgtaatcccagctactcgggaggctgaaacaggagaatcacttgaacctgggaggcgaaggttgcagtgaaccgagatcatgccactgcactcctgcctgggtaacagagcaagactccgtctcaaaacaaacaaacaaaagcattcttacagattatcttggcttttattcctttattctaccaataagttgttagcctctcttatgtgccatttgttacaaaaaatcagctgtcatttttatggagactgagaagtcccctgatctgtccattgtaagctgaagacccagtagggccggttttatggattagtccaagccccaaggcttgagaaccaggggagccactggtctaagactcagtccaagggaaggagaggatcaaggtcccactcatgcagtcacacacaaaggaggaattctccctgctggtgccttttgttgtatccacgccttcagtagatttgatgatgccaaccacacagaggagggcaaagtactaacttagtccaggcattcaaacatgaatctcatctggaaacaccctcatagacacactcagaaatagtgttcaatctgggcacctcatggcctagtccatttgacccataaaacttaccattactatcattaaaatggcatacgttatgtatattttgttaccataaaaaatttacattctgaaaataaagtacagtgtcttagctcatttgtgctgctacaacagaatacttgaggttgagtgatttacaaagaacagacagttatttctcacagttgtggaggctgggcagtccaagatcctggtgagggcttttatactgcattctcatgtggcaaaggcagaagggctggagaaagctaaaggctgcatgaagcctctttcctaagggccttaatcctctcaagagtgaggagctgtcatgccctaattgcctcttaaaggccatctcttttaacactaccacactggcaacatctgaattttggagaggacacattcaaactatagtagcaagtttaatttggaaataattctactcaaaaaagcattagaattgagtaatgaaaccctgtatatcccctccctggatgcaacaatggggtacgttgagtccaatccagggagcattctcgcttcctctctctactccatcttaaaaaattaacaataattttctgtccactccataatcccatttcaccaattgcccaaaatacctacagtagttatttaattatgtttactaacagaatcctcaagattccaacccttatatttgatttttacttctctctgatcgatctggcatttatcgacgaagattccatcaaaccctgggcttatgaaaaattttgcaaaaattccacagataggaaagtgttcattgtgtgcagcagaaaaatgttcatcatgcagagtggaaacatgtttatgtgtggcaagcaatggtaaagtgagtcctgcattttaaaatgaaaggacagtagatggaaattagaggtcacactgtgaaataatgaattctgttaaaggcaacaacataggttagtataaaaggcagcattatggtatttttggttagtaacttctctttggaaacctatcacaagcagagagactgaatccataattaaaaccttccagccaaagaaagtccaggaccagatggcctccatgttttttatatcagccatttaaagaattagcatcaattcttatcaaactctgaaaaactagaagaggaagaaactattcctaacgagcccaacatgaccctgaccgaagtcagttaaagaccctacaagatgtgacaactaaagaccaatatacctcgtgaatataggtgcaaacatcctcaaaatgtgtgccagcaacatgaatccaacagcatattcaaaagattatgtcatataactaagtgagattaatatcaggaatgtaaggagggttcaatataagaaaatgaatcaatggaatatacaacattaatagctcaagagagaaaatacatattccaaataacatagaacaacaaaatccaacaccttctctaaatgaaaaaaaaaaagcacccagaaaactagaagtagaaggaaacaacctctgtgtgataaaaggcgtttgtaaaaatcccacaacaaacttcatactcaataatggaagaccgaaagctatccctctgacatctccggatgcctaaccttatttaagtgagttcagcaaagttgcaagatgcaagatcaccatgcaaaactcattcatatttttttttggggggggatggaatcttgctctgttgcccaggctggagtgcagtggctcaatttcggctcacctcaagctccgcctcccgggttcacaccattctcctgcctcagcctcccgaatagctggaactacaggcgcctgccaccaagcccagctaattttttgtattttttagtagagacggggtttcaccgtgttagccaggatggtctcaatctcctgacgtcatgatccacctgcctcggcctcccaaagtgctgggattacaggcagagccaccatgcccagcaactcattcatattttatatgcaccagcaatgaacatctgaaaaagaagttttaaaagtaactctatttacaagaccaccaaaaagaatacaaataaatttatccaagaagatgaacttcttgtacactgaaaatgtcaagacatttctgaatgaaatgtgcagagatgcctcaggtggctcctgcatattccgcccctggtgaagcatgtttgcattttcttgggaactgagcacctcctgcttggtcgtaaggcagacaggccacacagagaagaataattcctccctttgggccagcagttcagggatcaagaaatcctagacctgaggagtaatttctgaatctacacctagaccaaggtggtgtctgagcctccagcagtcagtgaagagcaaccagcagtggtcaacagagagtcacatggcaaagccgcctggagctgggctggacctgcatgtcagggagatgctgacatgcagggagggtcagtgaccatgacctaacactggggggaaaaatgtccttctttttctagagtatcatcgttaacattgatgtacaaactcttttgccccatgtctcttacatctggctcttttagaatttgcttatttcacagcaacaagttcaagtcttatactacattgcatcccagcccacccaattatgctaaaactctggatctgtcaaacactttcagagcagcagatttgtacctggccctaaacgcatagtggggacactgaggcacagctcctagggccttcccctgaagctccaccaagggcaaaaacttatacaagcttcatggatattaaaaacctccatgttcacttagcaagggagaaattttattcaagttctgcagctcaggagctgtgctcaagagcaagacccagaacttctcaaagcctggttttggcacctgtagaatggagcccaaaaacgcagacagacttacctcggagctctatagggccaggacagcccaggagtaaagccagtttgagacacaatttggggtgaagatgtcggcccagaatagaaccaggagaggaagaagaaacccgtgtgctgagagtgggtctgctgggaccactcctctccttcctgggccctttggggctgagcccttctctaaaaaccacagagctactccagcagcagcccctgactctgctgatttgcatcatggccgctttatccagcaaggggataagagaggcctgggaggaacctgctcagcctgggtcttgggaagcagcatcgggggtgcctcagccatggcctggacccctttcctcctcggcctcctccctcactgcacaggtgctgcccccagggtctcactcacttgcccagccccaggcctctgggtccagcctggccctaacactgagctcagtagggccctacctgtggtgggcaggatgctcatgaacctgccgcagggcagggggctggtggggcagaaatccccccacactgtgctcctgttctcttggtgccctaagggcacttttattcctggggctcaggtcagttcaggcaagtggcaagatattctttggttaatccccagagtttcaggccttttcgctcctcttttctctccttgcaggctctgtggcctcatatgtgctgacacagccaccctcagtgtcagtggccccaggacagacacccaggatcacctgtaggggaaataatattggaattaaacctgcttaatggtaccagcagaaaccaggccaggcccttgtgcaggtcatctatggggatagcagatggccttcagggatctctaagtgattctccagctccaactcggggaacatggtcaccctgaccatcagtggagcccaggctggggacgaggctttcctctcaggtgtggggcagtggcactgcacacagtgacagaggcagacaaggaagtaagacacagaccccttccccatctgtgctgctgtcgtcctccagcccggcaacactgtggacaaagccatgagcatgcatgacccagttcacctggatctgagacccccagtctttacttccttcagccctccaggcaggctgtgcagagggggcatccagaatggatttagggctgaggtgaccaggatgtattggggttttgtggactccactgtgattcagggaaattagatcttccaagcagaccaaggtcaatatcctcagttatctctggatttccataggtggtgataggccagtccttggccgaaatgtcctgaatcagtccccagaactgcccagctgaggctcctgtcattctctacagaaaaactagtggagtggacactgtgggatcctcccagatcccctcttatgagctcacccacacagcactcctgggagcttctggcagctcagagctgttcggtgcagaaatctgcctcccccaggtttatgtctcttctcagggaggtttggtttcatgactgcctgtggccaaggtctcaagactcttcctcagtataacaggacctgaaaatcctccaagatccatagctccttgtagggctgactgaagcctcaatatgtgtcagggcctccttctgcctggtgttgcctccatcactttcttaatcatctgtgtatgatattctccatctcagagtctgtttccagggaacccaaactaagatcaccagccatccccaacacgggccatgagggagctgaagaggccactgtacactagaaagcatcagtttactcttaaattaccactgcgagtctgcaaatgcccagcgagacctgagtggttttttttttcatttgtgtgaaatgaaaagggagactgacatgccagatgctctgggttctgagggagagttggagtcagatcctcctgcaggaatccaggggcagcaggagcagcctcgccccatgcagggaccacagatgcacccagagggtgagctgcaggatggacactgcccacctccaatctgtatatcctgtgcaaaaaaatcattgttttcaccccttcttcagcctatcaaagttgtcacttaaaaagccactacatctcatcctgtgaacaggaaacccatccacatctccatcagccacataatctccacataaagattcttcaaaaaatagtaataatagctgtgaaaaagtatctaaaatattgcatgacaatcatacttagattacatatgaaaatggcactatttttgatatgctaggtaaataaaatatattatttgaagtcatttaccttcttctctttatatgtctaatgtggtgactagactagcctagtgggattcccattaggctcatcatactgtgattgaacagtgctggtctgcacctcttcaggttaacaggggctgtggagtgacctggtgcaggaaatatcatctccatccataggatatcagtgtgaacccagggagaggcactggtgcaagagagatgagaacaggggtgtggagtaggggactgagccttcactttgagccgaagaagtttcctttcctatcctcaatcctgaacaagagggatttctggacttctttttgttttcaagtttgtgccccttcagatttggggctgtctggaatcctgccaggggacaccgagaaaaaataggagtctcacactgactgttgtatttcatctgctggggccatcccaaaccactgcgtacaatttcctttcctggtgctcaaatagctgctccacgcacttgttgtggtttcagagatgaatctgggtgggaagacaggacagtgtatgttataatatttaaatggaacccaaatccattaatatttattttaatatggaacattaaaagagttttgtaataggcaatgggaaaaggtaaaaaagataaaagctttttgagaaaaaaaacaaaaacaaacttatagaatgtctatgtgtcttcagtgttgcagggttgagagagatcagctttatggtgccccatggatgtgctgagatggggaaaatcaagaaagaaggaagtatgtaccactgtgactcaacaaataaatcaaagtaaaatggacttaaatctttcaataagtcattcacaataaatatcactctggtgcacacagaaatgcctgttagcaaactttcccttccccctggccatgtctccatggatcacctgtgtgcagagtggctccggtcagtgctctgtgttccctccacagggctccccacaacatgtgccctgtgtggatgtgggtgcatcgcctggggtggctgatgtgctccagggattcgatgctgcagatgcctcagcaccaagggtgggggtgggaatgggacaaggctgcagctggggagaccaaggatcaaccacacacagcaggggtttccacggggtgagcagcctcatttcctgacagtagagcgagcctaaaggtaggtgccaggcagtggtatctgtggggtggcccaggcctggagggtcacagagacacaggcaccacacagcagagacactgagggccaggagctcactcaggtgagggacttcagcagatctttctctcctggtacaaagagatcaagttcctaccatcagaatagacaaacaaggactttaatctcctcagctgagccccactgtccagggaagaagtctctgagcccaggcccaggtgagagtgggatgaggagaggagccaggacacagattttcatggatgccccgccctcctctgaggcagagcggataagacagggctgggggcatacccagtgcttgagtctcaggaggcagcgctctcgggacgtctccaccatggcctgggctctgctcctcctcaccctcctcactcagggcacaggtgatgcctccaggaaaggggcctcagggacctctgggctgattcttagtctcctgctcctcaggctcacctgggcccagcactgactcactagagtgtgttttttcctttttccgggctctcgggctcagtctgccctgactcagcctcactcagtacccgggtctcctggacagtcggtcaccatctcctgcactggaaccagcagtgacgttgggcattataactatgtctcctggtgccagcagcacccaggcacatgatttatgaagtcagttataggctctctggagtctctgatcacttctctggctcccagctctggcaacatggcctccatgaccatctctgggctccaggctgaggacgaggctgattattactgcagttcatatacaagcagcaacattttccacagtggacataagattgattctcaggctccaagtctggccagtgagcttctttgagactccctgggatcccagcagtgacactgatcactattgctgtcccacacatcccaagtgatgaggaagtaagaccaaaaccctcctgagattcctgacttgtgtcctgacaccagggctgttgggattcctgtctttccttcaagattgttcaaataagcagtgacagtcacttccatgtgagatatgagaagaagaataattccatatgaaccaaatccacgaagcctacactgaagcctgccaagttctctgcagtccagcgcgatgaagggagcattttcgtgggaacttttgggaatatgaggggagccaggctcagctatgggttccagagacaaagctcctggatgtttctccccggccttggtccatcacctgctacctctcctcactctttccacagacactgccccaggctaagcccccacaggaccctaagcctattcctgaccctgagctcagcccaggtgatgcttcaggagatgggatcctgagaatgagccccaacatctctttaacctaaggtgtggggtcatgagacacctgttagccataagacacctgtcccccacctgctcaggagacagtggagcaggcaacagtgcagagagaaccagcaggagccaggccaggccctgcatccaaagcaggccccagtccccacagattctccagctctagcctgtggtacagcccccactttctgcaggctgaaatgggcttctcaggatgggcaggccatgatgggggatggcagtgtgtccacaggacacagccctgctgcctgcctgaccctcatgccccctccttccccaccctggttaatctccaccagaaagggcccaggttcagaactcaggacacctggatcagctcctggacttgcccccactgctctctgttctcctgagccacttagtctcttttggcctcagtgttacctgctgtgaagtgaggaggcttatactgaactgaggaagctcttttcttcattcaaaattaaaagacagaaaaacaatgaaagtcatgtaaattaaagcctgctgaggggatgtcatttaatgggcttcagtgggtttcagacgtggaacttcttgtcttttctctgcagggattccaagacaggggctcaaaagagcttgctttctgtatggtgggaacagcggtccctagctgagaataagcaggagattcccagcttcatcaggaaggcagactaggctagtgtagaaatcctctccgtacaaactctgagaggtgttgaataaaataaagataaacataatttcatgttttcatggtgccgatgatggtgatgttagctcacaactaagctgcagtgcctggaacatcaggaaatcacagtgaatcacagctgctcttattgggtgggaggtgcaccagtttgatgcctaagtacatagaaagcctgggtccctgtaggatggcacatgcatctctctggactttgaaagctttgcagaagagcttcagttgactcactctaattagtccggactgaacaaaaccactagaggagggcatttcaaccctgagacacttctatagccccaacttcctaccctgcgtgtgcgaactctctgtgctgggctgggcagggcagattgggtcaccctgcacagaatggggctggactgtctggtcctcaacttctgaggtgacaggtgctgtggaggcacgtggaagaaaaaagctcctgggctgagtctcctccaccagctgggggcagcagagctgcagccaggagcagtcaggattaaggctggggctgcccagctggggcaaagagaaggccagcctggcgttcaacaggtgtccaagaatcagtcttcagactgaaagtgagtgcagttcatcctatcccctcaggctgcagtgaccattctctgagggtcagactcatacagtgtcaccccaggacactgacagaagcccggcacagtgaaggcctcacctgggaaatgcagctggaggaggctgggaccaggtgtcaactggggcagcttactcaggaaggggatttctttggagacatcccaaggttgaggtgctctaggagggggcacagcgtgaggtgacggggctcccagggcccgggttcttcacccaggatggctgtctgagcctcctgccactctcagggccttgtccctctcagtccagcagcaacctggggagctgagccctctgtcctgggcacttccagatacaccatacctcacttccttctgcctcaccttccagctccaggcggactctgactcagggggaaactcctgtgctcaggggagtctcgggtgggtggggtgaagcatttgggatcctgatcccttcatggggcatccccagcatccttaaggagacactcttcagagggacagggcttctcacctgcctcagctctgaccatggggctgtccacactcagtgacaggacactgaccagggatctgactggagtgaccaggaacctggctggggcaaccagggaccacccaccctctggagctcacatgctgtgcagagaccatgaccctgggaccccttcagagaccatggggcctgaagttagattttcagtccagtgtggttttctcctgctttttgcaagtttacataaaacattgatgagaaaaacatacataaataacagacgagctgagggtgccaattgctaatctcttgtggcaatgaggggtgatgtagcaggagcagcaccatggctgaaatgagaccagaggccctgttgactccacaggggtgtgtggttgcttaaatgacccaactattcccactgaataatcagcaagtgtcccaatgacacagcacagcatttagatgaaatgaacaagaggggactgagtctgagggaccagggggaggaagatcatgggtccctgggccacctgctgctgagtcaggtgtcagcaagatctctccgcagagcccagctcagcccatggccaacctcctggaaggtccacagctctgctgagcctggcccaggacagaccccaggtcagcgaggtttgggacagtggtcatgagattaattcccagaaaggtgactgtgatcacagggcttgaaggctgcagctgattttctaatctgagaccctgcttcttcctcctgttgcctgtgctgccctcacagctggtttgagtgacatctctccaggaggaatcgcagaggatgtaaatttgcataaacgccaaacactgactgcccccaaaagctggagagggaataagagaggcctggggagcccagctgtgctgtaggctcaggaggcagagctctgaatgtctcaccatggcctggatccctctcctgctccccctcctcattctctgcacaggtgctgcccctaggctcagtctccacagaccccaagttgagcctgacctgaatcctgagcaaagccctgccactgcctctgggggggattcctggcaatgcgtcctttgtcctcaagccccctctcctgtcttttcttgcagtctctgtggcctcctatgagctgacacagccatcctcagtgtcagtgtctccgggacagacagccaggatcacctgctcaggagatgtactggcaaaaaaatatgctcggtggttccagcagaagccaggccaggcccctgtgctggtgatttataaagacagtgagcggccctcagggatccctgagcgattctccggctccagctcagggaccacagtcaccttgaccatcagcggggcccaggttgaggatgaggctgactattactgttactctgcggctgacaacaatctcacagtgacacaggcagatggagaaatgagacacaaaccccttgccatctgtgtcaccttcttcctccagccccaggaggactgtggacaaagccacgaacaggtctggcccagtacacccagatcagagactctgaggcctccttccttccagatctctacggaggccctacagaaggtggatcaataataaattcggggttggcaggtccagtaggtcctggtgttttctgggctggagtgtgacttggggaaaaatgacttgaatggaagtacagtcagtgggagacatctattgagtggtgatggtcccagtatttccttgtgtggtgactgaacctagggcagtgccactactctgtggcccaaatgccctgggttattcctctgagttccccgtgtattattgagatgctccagcccccactctcatggtatcctgatctgaagaatcatggccagtgcccattgcagtgtctccatctaggtgccattttcaggactcatgcatccagcatccaaacaaggctgtgtgggagaccgtgacttgtcacagctgttccccactggaaaatgccactgagctgcagagaactgctctcccagtgatgttcccccttcacagtgtggttcaggtgcaatgcctgcctggtccctagattttaatgccatgttttcatttaaaataaccacgaagtgtctcttgctgagcgctccggtgtaacacattcccagtcatgcctctcacaattttctttctgacaaaatttcctgaaaccctattgcaatgaattctccctctcagagtaggattgcagggagttcacaaattaacaaacaaaccaaatactgtctagaagaaagaggatcaaagaggagagagctgcacagggagcgcactctggagtctgcagatattcatgagcaccgatgagcatgtgcatgggaggaaaccttctgtgatagagaaaataaccattcaaagacatttgaggaaacactccatagagctcacacacacatccatgtgcacacacatgcacaatcagaatagtgcctgttcctccgctccatgaagaaaggcccgagttaaagtgggtgagatttaccagtgagaagagctttgcctcagtactggggaaaacattgccctagacaaaaggcatctctggtgttaactaagaaagtgtacggcccctgtgctgatgcccatgtcaaagaccatcacacgtattttaaccaactagcccagagttgtcaccaagagtttgatcttacaataattctgcaatgaacatccctattcagactccttggagttcacctatgaagattaccatagaataaatctctagaagttgaattgttaggtcaaaaagaagtacgtttgtaattttcactgattattctcagattcctattcacgggggggttgtaccaatttacagtgccagccataaatctttgacgtgagtatgctgttgaaagtttgggtttttgccaacatggtagattaaaattttgttgtcttgtaacagtgttattttggatttctcctattctgcttgaggttgaacattttctcaaacatttcagggctcttatattttaggatttagtgagcttttttctaaaatggccaggtaaggagggttttagcccctgtgggccaagagtcaactttgaccatattatgagggaacttataactccagttacaatgtaaccatttaaagctataaaaaccactctcagctctgggaccacacaaaacaggtggcaggccaggggtggccacaggatgtggtttaatggtccctgttttgtagggtcatttgaagtttaaaaatttcaccagcatatattttaggtggagatctttttgtgggtaatactgtatttcaccgcctatagtggcctgagatttctctctagataagaacacacttttcttattttttggatggattttgggtctatctgtgatagccctgtgtcataaactcataacttttgtgtccgtccttttactgtgatttttgggagtgtgacagtatatcaggaatacactatccagggtggaaaatcagagagagggggaggagcaagtgggcaaggaagcttgtaccaaagctggaatatccactgcagcaggctcagagaaaagggtcctaatatcagcatttgactgaagccaaaaccacaagagaccatagaggttctgaggatgacaaataaaaacatagtttaagttttaatgcattcattatttttataatccacaaaaattctaaaactcagaatttaacaatgggataaggaaaagagtttgagatgttaaacgataaagaccccaaggaaagttgccaggaaaagaacaggacctttttggtggaactatgtttatgctgtaaattaccctcttctatatgtctatatatatatttaggtataagagaacatctcatggaacacccttcttcaccacagtcaaagatcaccctcacccaaggagggaaccgaaagggaacgtcaatatgagacagaaaacataatgcacttttgtataaacattaggagagtctctatttgcatatcaaatgtggatgcttaatgttaacattggaaatagtaggttaatatgcatgtgaggtgagttttcttttgactatttctgtctgtgatttatctttcttaatagggacatttctgcccttagaacaacttaacttgtgatattttttgttctattatctgtatcagctctgttttttttttttcaaacagtggcaaagatatcccatgactaatgattaataaattcaattaatgggtatttaaattatttcaagagtggacagttgtgacttccccacatctaactcacagatgtcgctgatgctgactcactcttctcttccaatcatagcaaataaagtgggagctttgacttttctgaagacccagatgacaacaggagagaggaggtgaaaccccctaaagctgttatcctttaaaccctcaggaggaatcatcctggagaaacacccacacttgagttggattatacctaaatgagagtttggtcttagagttggtgctgagttagttcaggatttgggttgttgggatggagtgaatgcgctttacaagtgaaaaatacatgagtttttgggtccataggttggagagttcttggctgaattgtgtcccccagagttcatacaatgaagctctaatgcacggtgtgtgactgaatttggagagaatctttaaagaggtgattcagtgaaaatgaagtcatgagggtgggttcttatcgaatctgactggtgttctcgtgagaagagaaaatttgcacacacaaaaatgagacactcgagatgagcgtgcagaggaaagaccgtgtgaggactcagcaaggaggtagcgacccgcaagccaaggagagaggcctcagtgaaaaccaaacctataaacactttcatcttgactccccagcttcagaactgtgagaaaataagtgtctgctctttaggccagcaggtctttggtatctcattaaggtagcactagcaaatgaaaacaaaagggaccccaaagaccttggatgcgggaggaggaggagatggagcagggtgcaggaggtggggcagggaggggctggaagttcaggctctgaggtcatctcctgggtggaatcctgactccactcactgctgtctggggacttggggaaaaacaattaaccgcccaatattaattccatagtaaagatcgggccttgagcacaggattcctcatcttccttttttatatgatgaaagtcttcttgaggtcatgcttgtaaaacactcagcaatgtatctggcatacactatggtctcagaagtggttattatgaattttctagtgatatgtagaggatgacattggtcctgtgggcagagggggcactgtggaccttggtttgaggactctgaaagacaccaagtccgctggtagtgctcaagagcgaagagcatcacagatgcttcctcccaggccccttctattgggtaaaatttactctccactcctgacacccatctggtccttcttctgaccttagcacattatcagtttgaagacttaaggctcagggctcagatgggagctaggacaggcacactggggaatgaggagtagatttgcattcactgctcatcagagagcccacccaacaaggatacaagaataaaagaagtagatttgcatgaagagcctctccttcccatgataagagaggcctgaaggtccctccccagccatgggctcagagacagagctatgtggcatctccaccgtggcctggacccctcccttgctcaccctcctccgtctctgtgctgcctcccagggctcagcccccaaaggaccagagatcagactggccctgagcttcagctcagcacagggagtgatgcagagtgtggggctctgggaatgaccctcatcctcataattaactctcctgtcctctcttgtaggctctgtggcctcctccatgctgactcaggagccagtagggtctgtggccctgggacagtcagccagggtaacctgccagggagaaaacctaagaagccatggtacaaactggcaccagcagaagccaggctaggctcctgtgcaggtcatacatcgacaaaataaccagccctcagggctcccagaccaattctctggctccaagtcaggaacacagccaccctgaccatcactggggctcaggttgaacatgaagctgactattaccatcactcatgggacagcagtgctactcacctcacaatgacacagacagattgggaagtgagatctaaagaccttcactgtctgtgtcaccctcttcctccagccatagcaggactgtggagacagccatgagcagggctggcctgggtcacctgcatcgaagtcctccaagctgcccttccccccagctctccaggtagtctctgcagagaatgagtcaggataggatttggggctggcagaaccaggctgtcctgctgttatttggaatggatgtaccttggctcaagatgacctgagccatcttactggaaggacttactggaaggacggtaagagggagacagctcctgagtgctcatggtcactgaatttcctcctgtgtgttgactgaacccaatgcagtgcctctactctgtggcccaaataccctggattatttttctgaactgcccgtgtttaactgagaccctcaagccccagctttgtgcatcctgatgttctgaacatggaagcctttcacagtgtgcactgtgacatccctcagattcccgtttcaggacttatgcacccaccatcctcccagggctgcagggaggccctggcttctcacagctctccccaccagaaactgccatgcagtacagagaatagctttgctcaaagaattgcccatttcagagtatgtttcgggggcaatgactccctgatgccttaatctgaaagtcatgctttaatttaagaccctgaatatcaaattgaagtgccttctagctgaacactcaattgtaaaacattcccagtcacacactccacacttctttcctgagaatatatcctgaaaccctattgcatggaatcctccctctcagagtaggattccagggaacttaaaaattaaaaaaaaaaacaacacaccagtctagagggaaaaatattgaagaggagagagttagggagttgcacaaggaaagaactctgaagtctgcaaatatgcatgcactgaagagcacttgtgtgtaaagaaactccctctgaaagagaaagacccttgagggaacactccaaagagtgtgcatgcgtgcgcacacacacacacacacacacacactccagtcacagaggaaaggcctgagttacagagcatgaggtggactcatcagaagagcttcggctcagtattggggaaaatgtcggacagacatagggctactccactgtcaactaagaaagtgtagaagcaaactgggaaaagttaagacagtttccaagtaactttactgaatccaaaaataaaagaccaaaatagagaagaaaatgcaaaaggattataaactcaacaaagaaaaattcacaatgattggcattctgtcaatatttcttgcaagcaaaaaagaaaatatatgctttaacacagagaaaaatgaatcaatccaaagtggccaaaaattgcacacatgatagaccttgtaggcacgaattttggagcaattctttttttttttttttttttttttgatggagtctcactctgttgccaggctggagtacagtggcgcgatctcagctcactgcaacctccgccacccgagttcaagcgattctcctgcctcagcctcctgagtggctggaactacaggcatgtgccaccacacccagctattttttttttttaatttttagtagagacggggtttcaccgtattggccaggatggtctcgatctcttgacctcatgatccacccgccttggcctctcaaagtggtgagattacgggcgtgagccaccgcgccagccttggagcaattcttataactcttttctccttcctcatgagaatggaggatctattgaatgtgttaagtggagaaatggaaagcataaagcaagatgcaagttaaacttttagaaatggcccctaaatatctgcattgaaaaaatacactggatgagactcattgcagattagaagctgtgaaggaatagatgagtgaacttgaagatatggcaatggaagttatgcaagatgaagcacaaaaaaagtgaagagagcatcagtgagtttcaggacatcttcaagctgacttactggttataattaaagacatgaagggagataacattggtggggggagaggaaaggtagaaaagccatttaaaggaatcatggccacaatttcccaaatttggtgaaagctagaaacccactactccaaaaagcttaacaagtcacatacacacacacacacacaaacacacacacacaaataacacaccaccaacactcaccataatgaaattgctaaaaacctattataaagacatacttttaaaagtagccataaagacatggtatgtacagatgaacaacatcataaaaagaacagatttctttttctttttaaaattttcttaaacatctgtgggtacagagtaggtgtatatgtttgtgggatacatgagatattttgatacaggcattgccatgtgaaatagtcacatcatggagagttgggtttccatcccctcaagcatttatcctttgtgttacaaactactcaattacactatttcaggtattttaaattgtacaattaagttgctgacatgttatcaaatagtattgatgtaactctgacatgctatcaaatagtaggtcttattcattctttctattttatttacccattaagcatcccctaataagagcagatttcttcttagaagtcatgcaagcaggaggcagtggagctatatttataaaatattaaaagaaaaaacttactaccaaaacccatccacagactcaatgcaatccctatcaaaatacaaacgacattcacagtagtagaaaaaaactctatagttggtatggaaccacaaaatcccctgaatagccaaagcaataccaagcaaaaagcccaggctgaatatgtcacattatctgaatcaaaatatactacaaactacagtaaccaaaacaagatcgatggtattggcttaaaatcagacactgagactaatataatggaatagaataccccaaaataaattcatatatttacagccaactgatttgcagcaaaaatgccaaaaacatacgttgagaaaatgacatacttttcaataaatggcgctgagaaaaactggatattcataggcagaaccttgaaactagacttttatctctctccctatacaataatcaactcaaaatttattaaaactccgaaatataagacccaaaactataaaactactagaagggaacgtagagaacacaggggaagttcttcaggacgttggtctagacaaaaattccatagctaagacttcaaaagcacagggaacaacacgaactagacatatgggacttcattaaactgaaaatcttctgaaaagcaaaggaaacgatcaacagagtgaagacaacttctagaatgagagaaaatatttgcaaactattcaactcaaaagggcctaagatccagcataagaaaataagacaaggagctgaaataactcatcagcataaaaaacaaataatacaattaaaaagtggataaatgatatgaatagacttttcacagtcaaagacatacaaatggccaacaggtatatgacaaaatgctcaatatcactaatcatcaggggtacgcaaatccaaacctccatgagatatcatctcatcccagttggatggctatcatcaagaagacaaaaaaataacaaacactggtgaggatgtagagaaaatagaagacaaaaccacatggtcatctcaacagtcacatcaaatgttttcatgcgaggaaacattaccatttgttgtttttctagtcttgctagagcatcataaaaagataagatttgtggtgccactattggagaaaatgttattacatgcaaagactctggctatcccacaccaaactacatgaacacttactgttaaatgctaaaagaggccaggcacggtagctcacactcgtaatcccagcactttgggagaccgaggcaggcggatcacaaggtcaagagatccagaccatcctggtgaaaccccatctctacaaaaatacaaaaattacttgtatttttgcacggtggcacacacctgtagtcccagctactcgggaggctgaggcaggagaattgcttgaacccgggaggtggaggttgcagtgagccaagatcacgccactgtactccagcctggcgacagagtgagactcaggcaaaaaaaaaaaaaaaaacctaaaagattacaattctgcatttccaaatgttctggtggtcagagaccacttccttgacaagtggtgagtacggggatctgatgggataggtggcatttaggcaggtattgggtgaagaatagtgatatacacaagaaactttcaaagagaaaaacacacggaagttggaacacagaagagaacataatatgtctgagaaataaggaaagtccagactcactggagctgagtgagaacaagaaaaatggcataagccatgtatttctctctggatatctcatcaaaatattgtctcctccccaacacaccacccatgtgaattataaaaatgcccgtttttaatttttgtttgcatgtcgtgacagagtcaagcacgtgaatcaagctgagtttgatgagtccagggctgttaagctccagacccaggtggcctcagaaggacttggtggaacaagggcttgttgtcaaaagcagaggaagtgagattttccattgtggcttagaccagagattcttaaattccagtggacacacaaggccccttaaggatctggttaagatgcagatgcagcctcagcagttctggatgtggccccaaattctctgtgtccggcaactcccaggtgaggctgctgctgctggtcctcccaggaccacactttgagtggctgaactcttattcacccacctcactcaagccacgggtgagactcacacaaggagggcaccttctagaagcacaggtcacttctcactcctccccttgtgtcttagatcctttcctgttactataaagaagtacccaaggctgggtaatttatacagaaaataaaagttttatttggcagacagttccaatggctgcagagttcaaaatgtggcatctgctcttgttgaagacctcaggctgcttcctgtcatggtgaaaggtgaaggcgagccagtgtgtgctgaggtcaatgaggggaaggaagcaagagagaaagggaagataccagtctcatttaaataagcagctcttctggaaacagaggaaattcactcaccccaagtgagggcattaatctattcatgagagatccactcctatcaccctaaaagctcccattaattcccacccccaacactggggattcaatttcagcataagatttgcaagggatgaagatcaaagccatagcaccctgaggcttggccacacacttgctcatctccacatttgtcccttccttcaggaccgggatcctgactgctctgactcagtctccgtctacctcatggacacctggcagtcggtcatcatcggttttgctgaatcagcagcaacattgggggtaacaattgtgtctcctggttccaccagagacagagtagagacccacacagctgaagtgtggggtcaaatattaaaactaagagacataagattgattctcaggctccaagtctgacaagtgagcttctttgagactccctgggatcccagcagtgacactgatcactgttgctgttccacacatcccaagtgatgaggaagtaagaccaaaaccctcctgagattcctgacttgtgtcctgacaccaggtctgttcttccctcccctagaataaaacatctcttaagcacaaggctgaagaaatgtggcctcctcctttctcccacagctggtcaaagtggatacctgagagaattggctcactgaggcctcttgggaacaaaggctgggttcctgcctgtgatctgtgtactgagacacattccggacctgcccaggaaaggcaagtatagatgatgtttagttgtcacagagtccaagtagggacaattcagcggtgtcttcttgggacccctgcctctggctattttcatctactttataatgggccagggccattatttccaacttgtcatatcctttttctcctttcctcaccaggtaaggaggtggaggacagttgatgagggctggcttatgagttaccccaggatgcaaatgactttgaagtcaagcccatgtggggtcaagctcagtctataaccagggtcttttgagctctggaggagccaggcatcccagccatcaaagaggtcttgcatttgctaataaatcctcttcttccaacccacagcttatcttggctgcctaccctcatctctgtcaggaagcaatccttcgttgtttaacaccaaattattcttacttggtcagtttaaaagtcccttcctcagaaaggtcatctgtggcctgaagacaaagtgagaaggctttgctgcattttcatttggaaccttacattgccccttctgcaatgttctaaccacacatggcacatatttacaggacagcgtgataattcacttttgaaaatacagaatgtgctcatggaacaggacaatgtcatacttttggggcctgatgagcatgtccttttcacaggaccccccagagctgcccatgcatccagaaggtaccattctactctatgcaaaacgatggggcatttctatattgcagtttcttagggttccttagaaagaggccacccccaacacagagctgcacaccttgtgaccacttactgtcaattcctcaatgctgtctccaagtctcaccatgcacaagggaggaacacagagaccctggattcctagagacttgcatttcttggatgaacaaatctggggtttggttggtggcagagagctcagggctcatgtgtgagcatcacctgatgcttcctccagggtcagagtccagcccctaccctggaaggatgaaagatattgtccacagaagtggtataaaggtaacagcatcgaggacggagctgcctcttgaaatgggctattgctttgcacaacgctggagacctaaattatgttgactataatggaagagtagtccctgcggatggcctctaattgggtggaagaaagcagagggtctgcgtctgagagagcagcaatgggcagattcagcacaggcatgggcagagcagcaatcaagggtacctgagcagcaatggccccgggagaggcctggcacctgccggaagtgacgttggagacagagaaacatctaagacttaaggcttctctttctgtgcaatcccccaccccacagtttatgtgtcacagatattggcacctccttactgtaaggggtcatatgaataatacagtcctcaggggcatgggttcgaggggcagccaggtttatcctcgaagcccacttctgttacctgcagctgtgtggctgtaagcaaggcatttaatctctcagaaaaccatcctaatgagaggttaagaacctctgagaaaaaaacttagacaagaattgacagtaattcttcactattgaggctgcagggatgtaacttaatcatgtttgtaaagtgcataacacagaccctgacatgccccagctgctcctgagttggcagcaattattcctgacatcactcatgagaattggacctggaatggggatggagggaaggcagtgcagagggtttcagagggttaggaaaagagagactttaatgatttaaaatgaaggcctaggagtggagacaagcgtcctgggacattctcctgccaactctcacaatgtctcagagactgttccaaggtgaagtctactagagagctaagggaggagtttgcagaatcaaggtttgcaatgtcatgcatgagggggcagagagtcagcgggagggaagacagctgagctcatctgaagggtatttatggttttctggccctagagtccttggccatccctctatgaccagggcctcagataagcagagagcttatctgcttctctcctccaacgatagttcctggttatcctgagcccaggtcagtgcagctgtggcccattctctcctctttgtgctcagtggactgacctggaggaaacagtaggaggttcccctgctctctgtccccagggtcctttcctttcagtggcaccagcccagccctagtgtccatccatctgtgcctgcccagtcaggcctccatgctgccccctgtaatggccacaggtcaaaaactgattgtcagtcttgagcagattgtcctgactctttctgcaaaactgagcctctcacccagcaccaggacgtcacaagcaaggccagctgtaggaaggcaagtaggggagtaacgtgcatcacagagtctggacaagacaaagtagttctgctgggacacatcctggtgatgtttctcaggatggttcaggtccctgcaattgcaggcccagagaacaggactgaaggctggaagatgtgctccctttctcctgtacacaaaacagtgccatgtgtgcatgtgagtaaatgcatatgcctgtgtgcttgtgtgtgtgcacctgtgtaaatgcatatgcctgtatgtgagagagtgtgtgtgtaaatgcatatgatgtgtgtgagtgtgtgcatgtgtgtaaatgcatatgcctgtgtgtgtgcatgtgtgtaaatgcatatgctgtgtatgagtgtgtgtgcatgtgtgtaaacgcatatgcctgtgtgtgtgcatgtgcatgtgtgtaaatgcatacactgtgtgtgagtgtgtgtgcatgtgtgtaaatgcatatgcctgtgtgctggtgtgtgtgcatgtgtgtaaatccatatgcctgtgtgtgagtgtgtgtgcctgtgtgtaaatgcatatactgtgtgttggtgtgtgcatgtgtgtaaatgcatatgcctgtgtgtgtgtgtatgcatgcgtgtaaatgcatatgactgcgtgtgagtgtgtgtgcatgtgtgcaaatacatatgcctgtgtgctggtgagtatgcatgtgtgtaaatgcatatgcctgtgtgtgcatgtgtgtaaatgcatataccttgtgtgtgtgcacatgtgtaaatgcatatgcctgtgtgtgagagagtgtgtgtaaatgtgtgtgctgtgtgagtgtgtgcatgtgtgtaaatgcatatgcctgtgtgctggtgtgtgcacatgtgtgtaaatgcatatgctgtgtgctggtgtgtgtccatgtgtgtaaatgcatatgcctgtgtgtgagtgtgtgcatgtatgtaaatgcatatgctgtgtgtgtgtgtgcatgtgtgtaatgtatatgcctgtgtgtgtgcatgtgtttaaatgcatatgctatgtgtgtgtgcatgtgtgtgtgagtgtgtgtgcacgtgcatgtgtgtgtgcatgtgtgtaaatgcatatgctgtgtgactgtgtgtgcatgtgtgtaatgcatatacctgtgtgtgagtgcatgtgcatgtgtgcacatgtgcatgttagtgttgccagggagtgcttcaagtatcgaatgtcccaaattcacaacttttctattttcctcacttacctcctccctgacacatgcttctcagttaagtgagttcatatgcgcaaggcctacaaacaggcaaggcatgggccatagtcagtgctgagtcagtgtcatcaaatattgttatgcttatatagaaccttgtccagggtgggccaaatgtatgcccctgtcttgtcctgacagagcagcagaaagggagactgagacaaaacaatggccagggccctggcaacacggagacaccttcccactcctgtgagcttcacagacaaccctgggtatgggattcctgtcattcctttaagattgttcaaataaacagtgacaatcactctcatatgatatatgagaagaagaagaattccatataaaccaaacccatgacgcccacactgaagcctgccaagttctctccagtcgagcccaatggagggagcattttcatggggacttttgagagtatggagaagacctgaggaaaccaggctcagctgtgggctccagaggcaaagctctgggatgtctccccatggcctagacccttcgcctgccacctcttctcactctttgcacagatgcttcccccaggctaagcccccacaggaccctaatcctagtcctgaccctgagctcagcccaggtgatgcttcaggagatgggaccctgagaataagccctaaagtctcctcaacctgcaggctctgtagtctcttaaagactcaggtacctccagtagagttggccatgagacatctgtccctccaactgctcaggagcaggcaacagtgcagagagaaacagcagcccaggccaggccctacactcaaagcagcccccaatccccacagatcctccagcgctaacctggggtacaggccccacctctgcaggctgaggtgggctcctcagcatggctaggccatgacgggggatggcagtgtgtccatgggacacagccctgctgcctgcctggccctcatgccccgtccctccccaccctggttaagctctgccccaaagggcccaggttcataactcaggacacctggatcggctcttggacttgcccccactgttctctgttctcctgagccacttagtttcttttggccacagtgttacctgctgcgaagtgaggaggcttatactgaactgaagaagcacttttcttcattcaaaattaaaagatagaaaaacaatggaagtcatgcgaatggggggatgtcatttaatgggcttcagtgggcttcagacatggaatttcttgtctttcctctgcagagattccaagaaaaggactcgaaaagagcttgctttctatatggtgggaacagcagctgccagctaagaataagcaggagagtcccagtttcatcaggaaaacagactaggctagtatggaaatcctccctgcagaaactctgagaagtgtggaatgaaataaacataaacatgaaattaatctgccaacgatggtgatgttagctcacaactaagctgcagtgccagaaacatgcggtgattgcagtgaatcatagctgctcttactgggtgggaggtgcaccagtttgcttcctaagtgcatagaaagcctggcacgcacgtctctctggactttgaaagcttggcagaagagcttcagttgacttactctaattagtcctgacggaacaaaaccactagagtagggcatttcaaccctgagacacttctgtagcaattgctcctgccccacatccctgcactgcatgtgtgacctctctgtggtgggctgggcagggcagattgggccacactggcacagaatggggctggactctctggtcctcaacttctgaggtgacaggtgctgtggggtcacctggaaggaaaaagctcctgggctgagtctcctccaccagttgggggcagcagagctgcagccagcagcagtgaggagagaggctggggctgcccagccggggaaaagaggaaggcctgcctaaggttcaacaggtgtccaagaatcagtcttcagactgaaagtgaagacagttcatcctatcccctcaggctgcagtgaccacgctctgagggtcagactcatatagtgttactccaggacactgacagaagcctggcacagtgaaggcctcacctgggaaatgctgctggaggaggctgggcccaggtgtcagcttgggcagcttcctcaggaaggggattccctggaagaagtcccgaggtcaaggtgctctaggaggggcacagtgtgaggtgacggggttcccagggcctgggttcttcacccaggatggcggcctgagcctcctgccactctcagggccttgtcctgccctgtccagcagtgtcctggggagctgagccctctgtcgtgggcacttccagatacaccctgcctaccctccctctgcctttccttccagctccaggcagactctgactcaagggcagctcctgtgcttaggggagtctcaggtgggtggcgtgaagtatttggggccctggtccctgcatggggcatcaccagcctcattgaggagacactctccagagggatggggattctcacctgcctcaggccacagccctgaccccggacctgtccatgctcagtgacaggacaataaccaggaacctggctggagtaaccagggaccacccatcctctggagctcacatgctgtgcagagaccatgaccctgggaccctgggaccctgggaccctgggaccctggaaccgtgacagaatccatggggcctaaagttagattctcagtccactatggttttctgctgctttttgcaagtttacataaaacattgatgagaaaaacataaataaataacagacgagctgagggtgccaattgcttatctcttgtggcaatgagggaatggtatagaaggagcagcaccatggctgaaatgagaccagaggccctgttgactccacaggggtgtgtggttgcttaaatgacccaactattcccactgaataatcagcaagtgtcccaatgacacagcacagcatttagatgaaatgaacaagaggggactgagtctgagggaccagggggaggaagatcatgggtccctggtccacctgctgctgagtcaggtgtcagcatgatctctcggcagggcccagctcagccccatggccaaactcctggaaggtccacagctctgctgagcctggcccaggacagaccccaggtcaacgaggtttgggacagtggtcatgaagtcaattcccaagaaggtgactgcgatcacagggcttcaaggctgcagctgattttctaaccagagatcctgcttcttcttcttcctcttgtcgcctgtgctgcccccacagctggtttgggtgacatctctccaagaggagtcccagaggaagtaaatttgcataaacaccaaacactgactaccctaaaaagcctgagagagaataagagaggcctggggagcctagctgtgctgtgggtccaggaggcagaactctgggtgtctcaccatggcctggatccctctacttctccccctcttcactctctgcacaggtgctgtccccaggccctgctccaggccctgctccagtcttattccccacagatcccaagttgagcctgccctgaatcccgagcaaagcccagacgcagcctctgggtgcgactcctgggaatgggtcctttgtcttcaagccccctctcttgttcttccttgcaggctctgaggcctcctatgagctgacacagccaccctcggtgtcagtgtccccaggacagacggccaggatcacctgctctggagatgcattgccaaagcaatatgcttattggtaccagcagaagccaggccaggcccctgtgctggtgatatataaagacagtgagaggccctcagggatccctgagcgattctctggctccagctcagggacaacagtcacgttgaccatcagtggagtccaggcagaagatgaggctgactattactgtcaatcagcagacagcagtggtacttatcccacagtgacacaagcagacagggaagtgagacataaacccctccccctctatttcatcctcttcctcctgccccaggaggactgtggacaaagccatgagtaggcttggccaaattcacccaaatctgaacccccaggctgcccttccctccagccctccaggcaggcactgcagagtagtcagtctggagtggatttgtgcctggcaggccaggctgtcctgtgtttctttgcctggggtttgagttgtcgatggagggtctgactggaaagacagacacagggagacatccatgcaggcatgtccaaagggacatggggaactctcaggtctcagttgaatgcagtcattgttgtatcctctgggaaagcattcctctagtgcatctaagacctccagacccacagagcctgagatcaggaggagagaatgttaaatttttgctaatggaccactgaagacatttttgagtggagccactacaatttactccttgattctggactcatggatcctgactgtgggagaaacagcaccatctattgggcactgatgcacagaacatgccctatcctggaagacattgtccagccctacacatacttgccacttgcctggtgcagtaatggtgtctccaagcagtcattaaaccattcatataagccatatgtctcagaatgtttgggacaagagtaagaatcttgattgccagaagaaaaggcccatagccctttatttgcagtgaaatgaattccttggtcagaacctcctgtggaataccatcatgatgggtgcgtcattctgtaatccagagacaacagttttggcagaagcattgctgtcaatgaaagcaaatcctctgtagaataaatgtcaattctagtaagaaaaaagagctattcctgccatgatggaagagtgcaaacgaaattaatattaagcaggcccctggctgttttccacagagaaagtcatcctatagggatctctgtgttagtctctgctgttggcagatggtcactcagcagtggctacagccaggccagctccagttagtggaaatcgacattgatgagcccatggacagcctccatccctgccaccatgggcgcttttttttatggagcccactgggcattgacaagagtggttgagggaggctgcctgatgtccacagaacaagtcaccctactcacctgattagcaaaatcacttcattttcacagaagacttggtgagtattgacatatggaaaaaattctcttactttctgcccaccggaggaggtctattcacacatctctccccctgacgtatttgtgatcaatattctcattgtgtctctctcaagtccctgaacatccttgagcatctttcaagaccctgagtcacaacctgtgaattaggaacctctgcccatctcttggcaggtgacatgagccaattgcactgcttaaaattctactttaatgagaatgttcctccaacactgctgttcagggattctcagaggccaggtggagtactagcactgtccacaccagtagtggctgcatgtcctgcagaaaactctgtaaccccagcctaagtgcctcctcctaggcagctgatctcagggagcccctcaggacgtcaaggctgtagggtgagaggaagacatggtgcagggctccggtcatgtctatttggccaactcttcatgaaacttacttgggcctcgtgacctagtccctcaagtcacaaatacatccctgccatgtgattgaggagctgctggaaatggccaaccgggactgtggttcagaccaaacctagcatactggcaacttgggtcgcatggtgagctgtgtggccacaatcacacagagcctctgctgaggcccaggagcgttcgcagtctttctcaaatggagctttctgctcattcaaaaaaataagtagagggaggctgggaccccaggaccacttagaccacgcacatgatcttgtctgattattctgaatccttgcatgctcagctatgcattatggtaaccaagccacagtgtctttggcaataaaatgccactacttggcccccacctaacctgggatcccctcaaccacatcttgctacccaaaacaggtttcacctccactgagagaaatttatttttatattgagaagatgaaagattaattatttcaattgtgaaaattttataggacagtaatgtgaaaatattttaaaagacactttacgaagagtgaaagaccttccattaaaccactcaatatatgacactgtaattggcctacccaaaccctaagttcagctccgggttgggaccttctgggaatggacccttcatcctcacgccctcctctcctctcctctcctctcctctcctctcctctcctctcctctcctctcctctcctctcctctcctctcctctcctctcctcttctgtcagccctgtgcctcctatgtgcagagacagctggtctcagtgttggtggccctgggactgacaatcatgagcacatactctggagataaccttgagataaacatgcattaaggaaccagcagaatccaggccagtccatggtgctggtcatctagtataacagcaactgaccctcagggacatctgcccaattcttaggcttcaactcagggaacatggccaccatgaccattaatggagcccaagcccgggaagagactgactattgctgaactgcagataataacagtgggagcagctggcagggactcatagtaacacagagagacagggactagccacagaactgtcccatctcggcctggctctcattctcagctgccctgtgagcagctgaaggtcaggcctcagggtcaggcgtcctctctggtcttaacctggcccctgcagggctggtgattctgagcagcttctccatcctctcagggcctgcatgtgtccagtgagaagtgagtggacagggggaagctggttggagctgcaggaacctctgtcaggtttgtggtgtacatgaaaggtttaggaatccacacaacatcacatggccccagatgtaatcacacatcacacaggggaggaaagagctgtcgcagagggtacagtcctgtggaatttctcttttccttgggtataagcagcttagtggaagctccagaggctgtgtctcctctggtttccagatgagttcagttgacctccgcattctaaaggggtgcctgaggcctgaggaggactggagacccagccccttttggccccagggccctttctgtgctgacatttcacagaaactgaagaggaagaacagacactacctttcatcccacctggggactgtctttggggcacgctgaactcccatggcccccaaagtcccatcaccttccccaggtaggtcagacctgactggatgtccctctagtgccctgatagtgtggattttatctttgggctctgggctgctttctgaggagctcactaagaacccttgatgccaagtccaggacctgcccctctgctccatgtcccaggggctgcaagcatgacgggaaggtcctgctgggtgaggatggtgcccttttccagaagagatgtctgattccagtctctagggccaggtttgttgggctttttttctcacttggaaggtctcagtctctttattaccttctttaaaagtacaattggtttaatcgtgaaatcatgtgcatgcactaaagtttacagactatggtcatcagcacatatgtacactctttctggatgggacaactgtggacacggccatactggggtctctgtctctctcattatcacaagggaggataccaacagctctctcctatgcagaccgtagtcatgtttcccaattgcacaagaatgtctcttacagttgtttaatttccttcccagccaggacgcttaagtttcccatgctgatacttggttgctatttctctctgatccaacatttttcaaacagtattgcttgcaacccaaggcttatgaaacactttaccaaaagttccacaagaaaagctcaagtttctcatgcaccgttggaccaggttcattgcgtgcagtaggaccttgctcaagtgatgagtccatttgatgttttcaccatcaaggtgaagggtattatgacttttgggcactgagttgatagaaggaagacagcagctgatgatggccctgcccaccgatgtgtgtgtgtgggcaggacctatcgatggatttagaagttgagggaactgtttattctgcagatggaatttccagcactgaatctccaccaaccagacactagcactcagcaggtgctctgtaagaagaagcccttcactgccaatcacggccattacacaggtgaaggagaggatgatttttaacagccattgaccctcacagtaaactgaggtcaaaactctggtacacaaagtgactttgagagaacaggctgaggaagcaggttaattagtagcagaaggctttgccgagagcaggaacaaaacagggttggtgaggaactagtgatgccatggtgtggaaggaacaaggcctgtaccaggagcaggaaggggcatgggaaagaccacactgccacatgtgatgagtcagcacatggaaggcacagcaaatgttgcacaaaggtttttgtgtaataacctggcaaacagctgcttctctatcaagattgatgagtcaaaaaatgttactgatgcattgctgtcacatgtgaaggtgtgtgaagaatggtgacattcaaggaaacctgttctctgcagacacctacccaccagtacagcagacaccccagctatgccaagggctttgtcttcctctggggtaagagcctgggaacaacaagttggcccctgaaaggggtgccccatcatgcgctcttcatggctgagttaagtggggagctcccagagaactttccagtaaatggtcaatctgtttgttctgggtgcattgagcatgacccaggatcaatggaagtgacagaagcttaatttccccaaggctgcaaggcgggcactgggaggacggctgaagcagtttagccaccaccccctagtggctccagccccaggtaagcagggacagttgaagggcctgcctgagcccacctgtgtctaattagttccagcatcagcagctgcatcctgtagaccaccaaggagtgtgtgtgcccagcccctcacagatcacctgagcataaacaggaaattctccttcttacacctgactgcaccacacatctgccccttgctcttcatttacaagacgctatcacatcagacacggactgatctgagtcccgggttccctcaggtttctgctgtcctctcagatccccacacacaaaagactcttcaccacagggcgttgagccagctcttcccctaacactgcctcttacaggttactcttctccaatatgatgcgggtttgatttcagtgtttctacatatatacttttgtattttattgggtaagctgagccccttgtacctgatcttgagtcaggcaggggccacacagagaagaggtgttcctcccctgggaccagcagtcctcggatcagggcatcagggacctgaacagcaggttctgaatccacacctagacccaggaagtccctgagcccccagcccacagtgtggagcggccaccagggggaagcagagagttacctggcaaagccacctggcgatggggcgggcctgggtgacagggagacgctgacatgcagcaggagccagtgaccatgatctcacacctggaatgaaagggtctttattttcatagagtattgtccttgtgtacttgacactcatgtagaaattctagaataggattttaccttcagctcttgcagatgctgcctctttctctgccacagctccaggcacttgacttctcacagtgccctctcctcacacacccagttgtgctaaaatggtgtccctgccatgtgcagtgtcctccctgaggtcacaggtgtcccctttatctcccctttgctctgggagcccctgtcctgcagacacagtggcttctcctttcctggctgctcctccactttcattgtccctggtctttccggactctctcctggggaagctgccaaatcatggctcttgatttcctggtgagtcacaaaatagttgctcattaacctttagttgacttaagttcttaatcattgatacattttccccaacaactgacgacaacttagttataataaacattcacttctgggggtcttggagtttgcagccccctctcattctctcatggagcaaacatttccttcgcctcctcatctgtctctgatcctgacagcatcctggagatactgaggcacagcagctatgacctacccaggagcttgcagccaaggcagaaacttccatcacctcatggatcttccagcactctgtgtgcacttgacaaataagaaattccattgtcctctaccactcaggagctgtgccctgcggtgggacctgcacctttccaaggtgtgtgttatcatctgcacagtggagatgaagagggaacctgcattgggttctggaaagtaccatctaaaaatatatttagacctgcaacagaaatctcctctctaacataaaatatttatgatcaggacacactgagaggcctagaccaaaattaagcactgccctcctgagccaggatagaatggaggaggggactggggaccccagataattccacagttaccagcatgactctatgatcacctcctggaccagatcaaagatcatcccatatgaaggacttcatattccttaggaaatacaaagtcacctctgagctctgctgtgaccaagtgagcccaggaatgaggctgagcacagtgtgatgtggagatgtctgcagagaatatggaatcaattgataaaggagatcctgtgggcaaagggtgggagggcaaggccacccctaacctctttgggtcccttggggctgagtccttctggaaaccacaaagctcctccagcagcagcccctgactctgctgattggcatcacgggctgttctctccaacaaggggttaagagagacctgggaggagcctgcccagcctcagacttgagaagcagcattggaggcacttcagccatggcctggcccctcttttccttggtctcctgactcactgcccaggtgctgcccccagggtctcacccacctgcccagccccaggcctccaggttcagcctggccatcagtctgagctcagcagggccctgtgtgtggtgggcaggatgctcgtgaccctgctgcagggggaggggctggttgggctgaaatgcccccactctgtgctcctgtgctcatgggtgccctgagagctcttttattcctggggctcactccagccctggcaagtagcaagatatcctggggttgagcctctcagtttcaaattttttatctcccctttccttcttgcaggctctgtcacctcctgtgagctgacacagccaccctcagtgtcagtagctccaggacagatgactaggatcacctgtggggaaaacagtattggaagtaaaagtgcttaatggtaccagcagaagccaggacaggcccctgtgtgggtcatctatggggatagcaggcggccttcagggatctctgagattctctggctcaaactcagggaacaggaccaccctggccatcaacagggcccaggctggggaccaggctattactgtaagatgtgggacattaggactcctcatcccacagtgacagaggtagatggggaagtgagacacaaaccccttccccatacgtgtcactcttgtcctccagcccaggaagactgtggacaaagccatgagcatgggtttcccaattcacctggatctgagaccccccaggctgccctttccacaggccctccaggcaggctctgcagaggggacatcaagactgaatttagggcagaggtgaccaggatatattgaggtttgggggactcagttgtgatttggggaaatggggccagaatggaaggtcaggccaaggtcaacatccttagttggtctctggatttccatagggggtgaaggccagtccttgggctgaatatcctgagtcagtttccagaactgcccagctcaggctcccatggcatcctgccattctctgaaaagggccctggcatgccaggtgctctgggttctgagggagagttggaatcagatcctcctgcaggaatccagggtcaggagaagcagcctcacctgacacagggaccacagatgcacccccacagggtgagctgcaggatggatgctgctcatctccaatcctcacatcctatgcaaaaaatcattcttttcacccctccttcagtgtatcaaagttgacacttaaaaagccttaagagcccactcttgtcaacagaaaacccattcacatctccatcagccacacaatctccacagaatgattcttcaaaaaacgataacagtagacatgaaaaggtatctaaaatgttacataaataattgaacttagattacatatgaaaatgatactatttttggtatgctaggtaaataaaatatattatttggactcctttactttcttctctttgtatttctaatgtggtgactagacattgggattccaatgaggctcacatcatattgtgattgaacagtgctggtctgcacctcttcaggtaacaggggctgtggagtgacctggtgcaggaagccccatctccaatcataggacatcagtgtgaacccagggagaggcactggtgcaagagaaatgagaacaggagtgtggaccatctgcttgtacaggggactgagccctcactttgagccaaataaactttttttctattttcaattctgaagaagaagactttcctggacttctttccgttttcagatttgtgccccttcaggtttggcctgtctggatcccagccaggggacaccgaggaaatccaggagtctcacactgactctgttgtatttcatctgctggggtcatcccaaactgctgcgtatcgtttcctttcctggtgctcaaatagctgctccatgcacttgtcacggtttcatagctcagtctaggtgggaagacaggatagtgtatgttataatatttaaatggaacctgaatccattcattgtttttgtttttttgtgtttttgtttgtttttgttttgtttcgtttttgagagagagagagagtcttgctctgtcgcccaggctggagtgcaatggtatgatctcggctcactgcaacctctacctcccaggttcaagcgattctcctgcctcagcctcctgggcagctgggattacaggcccccgccaccacatccagctagtttttgtattttagtagagatgaagtttcaccattttggtcaggctggtctcaaactcttgacctcaggtgacccacctgtcttagcctcctaaagtgctgggattataaaggtgagccaccacgcccgacccaatagtttttttaaaatatgaaatgttaaaagagttttgtcataggcattgggaaaggtgaaaatagattaaaaacattttaagaaaaaaaccaaaaatgtacttgtagactgtctgtgtgtcttcagtgttgcagggttcagagaggtcagttttatggttcactaaggaggggctaagatggaggaaaccaagaaagccaaaaacacacatctctgccactcaaaacataaatcaaagtaaaatggaaaaaatctttcaataaatcattcccaataaatatcactctggtgcacatagaaaggcctgttagcaaactttccctttcccctgctggctcatatccccatggatcacctgtgtgcagagtggactctgtggtccccatttctcaggctgagaaccagagactgggaaggacaagtcacctgctcatgagtgggaagggcaggattgggagcagctggcttgggttcaggactgtggccctggtcggtgctctgtgtccctccagagggtccctcccacatgtgccccgtgtggatgtgggtgcactgcctggggtggctgatgtgctccagggattcgatggtgcagatgcttcagcacaaaacgtggaggtggggatgggatgaggctgcagctggggagaccagagaccagcgccacccagcagaggtttccacggggtgggcagccccatttcctgacagtagagacaggctggaggtgggtgccaagcagagggcgctgtggggtatgcccaggcctagagagtcacagagacacaggcactacacagcagaggcactgagggccaggagctcactcaggtgagagacttcagcagatccttctctcctgagcaaatcaggtacaaaaaaaattaagttcctgccatcagcatgcacaaacaagaacattcatctcttcagctgagccctgctgtccagggaagcaaaagtctctgagcccaggcccacgtgagggtggggtgaggagaggagcccaggatgctgattttcatggaggccccgccctcctctgaggcaaaggggataagacagggctggggcagggccagtgctggggtcacaagaggcagcgctctcgggacgtctccaccatggcctgggctctgctgctcctcactctcctcactcaggacacaggtgacgcctccagggaaggggtcttggggacctctgggctgatccttggtctcctgctcctcaggctcaccggggcccagcactgactcactggcatgtgtttctccctctttccagggtcctgggcccagtctgccctgactcagcctgcctccgtgtctgggtctcctggacagtcgatcaccatctcctgcactggaaccagcagtgatgttgggagttataaccttgtctcctggtaccaacagcacccaggcaaagcccccaaactcatgatttatgagggcagtaagcggccctcaggggtttctaatcgcttctctggctccaagtctggcaacacggcctccctgacaatctctgggctccaggctgaggacgaggctgattattactgctgctcatatgcaggtagtagcactttccacagtggtccaagttcatggggaactgagaccaaaacctgcccagggccttcagacttcctccttgctctgaagatgcttcctcacccggtgcaagaggcttgctgcagcgcggccttgagaattcttctctctcagctccttccctttccaccatgaattccaacaggaaacctgccctgtggtttcccatccaggacagggacagcttcctgatgcttgtgtgctgtggtccctgaatgtgcaactcttcccagctcttcaaatgcagggacagtgacaaggagctgcctgattggtgcagtcactgcttttttcagggatgtcttcaccctacatgtatcatcatcccctacactgtgggtagaattttagcaactacattctaatggttatcgccacaactttgatcttagaaataacagtgcagtgaacatccctatgcaggctcctttgagttcctgtgtgaatacgaccataggattcatttctaaaagtgaaattgcgggtcagaaagatgtgtgtttgtgattttcacccaatgttgtcagattcccctccagagggattgtaccaattttcaatgccagctggaagtacttgttcagagtacattgttgaatgtggaaatttttgccaacgtatcagagtgaaaaatggtaccttgttacagttttatttttcagtctcccgttctgcttaaggttgggccttttcacaaatagttcagtactcttcatttttcatgatttggtaaactttataaaaaatatccagataagaagaattttagtctttgtggccagacacggtggctcatgcctgtaatcccagcattttggaagactaagacgggtgaatcgcttgatcccaggagtttgggattagcctgggccacacagtgaaccctcatctcaattaaattaaagaaaataaaaataatttttaaaaaaatcctttgtggtccaaggatcaactttggggatattacctatggacttatatcaccatttacaatgcaaacatttaaaatgataacaactactgtcagctgcagaactaatttgactccatcaaaaaaaaaaaagctaaaagattataattctgcatttccacatgttctggtggtcagagaccacttccttgacaagcagtgagtacggggatctgaagggtagttagcatttaggcaggtattgggtgaagaatagggatatacacaagaaactttcaaagagaaaaacacatggaagttggaacacagaagagaacataatatgtctgagaaataaggaaagtccagactcactggagctgagtgagaacaagaaaaatggcataagccatgtatttctctctggatatctcattaaaatattgtctcctccccaacacaccacccatgtgaattataaaaatgcccgttttaaatttttgtttgcatgtcgtgacagagtcaagcacgtgaatcaagctgagtttgatgagtccagggctgttaagccccagacccaggtggcctcagaaggacttggtggaacgagggcttgttgtcaaaagcagaggaagtgagattttccattgtggctgagaccagtttcttaaattccagtggacacacaaggccccttaaggatcggttaagatgcagatgcagcctcagcagttctggatgtggccccaaattctctgtgtctggcaactcccaggtgaggctgctgctgctggtcctcccaggaccacactttgagtggctgaactcttattcacccacctcactcaagccacgggtgagactcacacaaggagagcatattctagaagcacaggtcacttctcactcctccccttgtgtcttagatccttttctgttactataaagaagtacccaaggctgggtaatttatacagaaaataaaagttttatttggcagacagttccaatggctgcagagttcaaaatgtggcatctgctcttgttgaagacctcaggctgcttcctgtcatggtgaaaggtgaaggggagccagtgtgtgcagatgtcaatgggggagaggaagcaagagagaagacaaagatgccaggctctttttaataaccagctctttcggaaacaggggaattcactcaccccaagtgagggcattaatctattcatgagagatccactcccatcaccctaaaagctcccattagttcccacctccaatactggggatccaatttcaacataagatttggaggtgacaaagatcaaagccatagcaccctgaggtttggccacacacttgctcatctccacatttgtccctcccctcaggactagggtcctgactgctctgacttagtctccctccaccttatgggcacctggcagtcggtcatcatcagctttgctgaatcagcagcaacattgagggtaaaaattgtgtctcctggttccaccagaaataaagtagagccccacacagctgaggtgtggggtcaaaaattaaaactaagagacataagactcattctcaggctccaagtctggccagtgagcttctttgagactccctgggatcccagcagtgacactgatcactattgctgtcccacacatcccaagtgatgaggaagtaagaccaaaaccctcctgagattcctggcttgtgtcctgacactggggctgttgggattcctgtctttccttcaagattgttcaaataagcaccgacaatcacttccatgtgagatatgaggagagaataattccacatgaaccaaatccacgaagcctacactgaagcctgccaagttctctgcagtccagcacgatgaagggagcattttcatgggaacttttgggaatatgaggggagccaggctcagctatgggttccagagacaaagctcctggatgtttccccctggccttggtccatcacctgctacctctcctcactctttccacagatgctgccccaggttaagcccccacaggactctaagcctattcctgaccctgagctcagcccaagtgatgcttcaggagatgggatcctgagaatgagcgccaacgtctctttaacctgaggtgtgaggtcatgagacacctgttggccataagacacctgtcccccacctgctcaggagacagtggagcaggcaacagtgcagagagaaccagcaggagccaggccaggccctgcatccaaagcaggccccaatcccacagattctccagctccagcctggggtacagccccaactttctgtaggctgaaatgggcttctcaggatgggcaggccatgatgggggatggcagtgtgtccacaggacacagccctgctgcctgcctggccctcatgcccactccttccccaccctggttaatctccacccaaaagggcccaggctcagaactcaggacacctggatcagctcctggacttgcccccactgctttctgttcccctgagccacttagtctcttttggcctcagtgttacctgctgtgaagtgaggaggcttatactgaactgaggaagctcttttcttcattcaaaattaaaagacagaaacaataaagtcatgtgaattaaagccttctaaggggatgtcatttaatgggctccaatgggcttcagacatggaacttcttgtctttcctctgcagagattccaagaaagggactcaaaagggcttgctttctgtatgatgggaacagtgatctccagctgagtataagcaggagagtcctagtttcatcagcaagacagacaaggctagggtagaaatcctcctggcacaagctctgagaggtgtggaatgaaataaagataaacatgaaattaatgtgcctatgatggtgatgttagctcacaactaagctgcagaaccagaaacctggtgattgcagtgaatcatagctgctcttactgggtgggaggtgcaccagtttgcttcctaagtgcatagaaagcctgggtccctgtaggatggcatgcacatctctctggactttgaaagtgttgcagaagagcttcagttgactcactctaattagacctgactgaacaaaaccattagaggagggcatttcaaccctgagacacttctatagcaattgcacctgccccaccccactgaactgcgtgtgttacctctctgtgctgggctgggcagggcagattgggtcacactggcacagaatggggctggactctctggtcctcaacttctgaggtgacaggtgctgtggggtcacctggaagaagaaagctcctgggctgagtctcctccaccagttgggggcagcagagctgcagccaggagcagtgaggagagaggctggggctgcccagctggggcgaagaggaaggccagcctggggttcaacaggtgtccaagagtcagtcttcagactgaaaatgaagacagttcatcctatcccctcgggctgcagtgaccacgttctgagggtcagattcatacagtgtcacccaaggacaccgacagaagcccggcacagtgaaggcctcacctgggaaatgcaactagaagaggctgggcccaggtgtcagcttgggcagcttccttaggaaggggattccctgggagaagtcctgaggccgaggtgctctaggaggggcacaatgtgaggtgacagggctcccagggcccaggttcttcacccaggatggcggcctgagcctcctgccactctcagggccttgtccctccctgtccagcagtgtcctggggagctgagccctctatcgtgggcacttccagatacacccgacccctcctgcctctgcctttccttccagctccaggtggactctgactcaggacgcagctcctgtgctcaggggagattcaggtgggtggcgtgaagcattttggggccctggtccctgcatgaggcatcaccagcctccttcaggagatgctgtccagaggaacagggcttctcacctgcctcaggccacagctctcaccacggggctgtcctttgatcagtggcaggatctgcatggctggagggactactgaccacatgctctctggagctcatgtcttgtgtggagaccatgacctggggaccctcagaaagaccaagcagcctaaagttagattttcagtccagtgtgattctctggttcttttcgcaagtttacgtaaaacgttgatgagaaaaagtgaataaataaaggaagagttgaggatggcaattgctggtctactgtggggctgggggataccatggaaagagcagcaccacatgtcaaatgagactagagattgggatgcatccgaaatatgtgtggttgctcaaatgacaaaactcttccaactgcaatgattcataagtgtcctacagacacagtacatcatgtacataacattaccaggatggggccaagtgactcgggggtatcaggagcagggatgaaagaggagaaagatgatgcatctttggtgtacttgctgctgagtcaggcgtcatcagtgatttctcaacagggcccagctcagccccaggccaggctcctggaaggtccatagtcctgctcaatgcagcccaggacaggccacatgacacagaggtttgagacagggaccatgttgtcaatccccaggacggtgactgtgatcacaggccttggaggccaaggctgattttctgactggagaagcagacgaaggaagctggggattcaccccttcattttaagtttctcatgctgcccccagagctggcttgagggatatcccgccatgaggagtcccagagaagtaaatttgcataaacaccaaggatgcactgccccagtgggcctgagaggaaataagagaggcctgggaagcccagctgtgctgtgggctcaggaggcagagctgtgggtgtctcaccatggcatgggccacactcctgctcccactcctcaacctctacacaggtgctgcccccagaccctgccccaggctcagccctcctaagcccctggtcttaccctgaaccctgagctcagcccaggcatagcctcagggcgatactactggaatgggtttgttatcttcaagccccctctcttgtcctctcttgcaggctctgttgcctcctatgagctgacacagctaccctcggtgtcagtgtccccaggacagacagccaggatcacctgctctggagatgtactgggggaaaattatgctgactggtaccagcagaagccaggccaggcccctgagttggtgatatacgaagatagtgagcggtaccctggaatccctgaacgattctctgggtccacctcagggaacacgaccaccctgaccatcagcagggtcctgaccgaagacgaggctgactattactgtttgtctggggatgaggacaatccctcagtgacacaggcagatggggaagtgagacacaaactcctttttcatctgtgttgtgttcttcctccagcaccaggaagactgtggaccaagcaatgagcaggtctggccaagttctactggatctgagacctccaggccatccttttttccagctgtccaggttggctctgcagagggtggagcaggagtggatttaaggctgctataatcagaatttatggtgttttggggcctcatgagtgacttggggaaataagaactggatggaagatgaaagagatgtagagaaccatcacttgaccttagatttccatacgatggtgattgggtcactccttcttcaaaatatcctacatcagtcccgaaaaatacccacctcagctcaacacctgagcttccaggcttccatggcagcctgggattttgaacaggaaaagccaaggaggggacactgtggcatctgcctcaatacccttttctgagctcacccaacctcaactgctgggagcttctaggagctcagagctgtgccctcactgggaagtgctattagctccaaagaaaacttccttcctcatatttaggcccagttttgagagttttggtttgatgactgcctgagccaagaacccaaggccctgtcctaatagaggatgacactgaaaggccttccagatccagacatcccagtatggatgcctgaggcctcagttgcaaccctattgtgggtcagggtctccttctggtgggcgatgcctccctcactccttccagatcctctgtgcatgcacatctttttctcagagtctacttccaggaaacccaaactaagatggctggctatcaccaaaataaactaccatagacctgaggtggaaacaccagcgaatttcccaaatttccattgtgaacatccaaatgcccatttatatctgagtgttccttgtattcttataaaatgaaaatggagcctgacataccaggtttttggagtcctgaaggagatgtggagacagatccttctgcaaggaatccaccgaaaggggagcagcctcaccccatgcaggggctggagatgctcccacaggggcagctgtagcatggacgctaccaacctccaccctgcacatcctgcacaaacaatcactctttcacccctccttcagcttatcaaagttgacacttacgaagccagcacagctcacccttgtcaatcagactccttcaaacctccatcaaccacacaatctcaacataaagaatctccccaacataataataggaacagtagctatgaaaatggctataaaatatctcataaataattttagattgtgttcatgtgtaaatattatttttcacactttgggttaaataaaatatattactgaaactagtttacctttttattttttatgtctagtatggtgactagacagtaggattcacatgagactcacatcatgtgattgtacaatgctggtcttgtcttaccccttgaggtggcaggtgctttggagtaacctgcttcagcaagccccatctccacccgtaggacatatgtgtgaagccatggagaggcactggtggaagagaaatgagaacacagatgtggaccagctgtttatgcaggtgactgagtcctggagccctgatcctgttctaacctagatgtgtcacatccatctcaccagagaccgctgctggcctgccttagctcataactggggggatctggcagttcatgaaacatggtcgcttgatgtccagtgttatcctgtctctctcagggcccaataagacaaaaggagctgcttttagaaagggaagtaacactctactgcacatgacatggccttattccaaaaccccatgagtctacgttgggattctccagtggggtttgccatgtacaggaggtttcagttcccacagtagagtcagctggattctctggacccaacagcaggacactcacaaccctgcctgcacctgctgcagagcctcaatgctctgggcctggaaaacaatgggtgatatttgtggctcctgatatatgggttggagccacatccccaagtgtaaaatatgctactcctagacctttatagaccttgtgtctgtttcttcctggagggaattgaagggtataataacatgttctttaatttgtaggagactctcagctgctccagacaactgaagtcccaatttctgctaatacagaagagggaacagtttatttcccactcttaaaagtgcatggatctcacaaaagcttccagtaggccatgcccatcatgtatatgtgattcaactatgatatcaagatggtctgaaccctcatgatgatatcatgatagagataagagagctaatgatgctgggcagagaaagtgtgaatgtatactgtcgtccattccacctgaatgcacactgattctgatcctattctctgagggaaatagacaagacctcagtatctgcttcagtgaggtaactgtgcacctgcagccatagcattctgttcccagagatccccatctggcacagatattgctaatgccactattgcccatctgggtctgtacaaatccaaattcatcttccaggatcattcaactattgtagagatcagtccagtaaactgaaaacaaaaccccagaagtaatcacacgtactgcgggagaggagagagctgtctcagagggcacagtcttgttgaaattcctctgctccttgggaagaaacagcccagaaaaggccccaggggctgcgtctcatctgggttcctggatgaggcacaccccctactgcactgagattccacagaagctgggggtgaagtgcaaataccgtctttggttcatccttgggattttctttttatcacacactcgtcattttgtccacaatgtccaaagtttctaaagtgctgtctaatagatagaggttctttgtgcgctgaactaaaagctcttgggttggacaatggtgatgtttgcacaacatttttactgtacttactgccgcttaattacacacttaaaaatgattaaaaggatgaaacattttgttatgtttattttaccataataaaaatattgcatgctcaggaagcaaagtaattttgcaattatacaactgttaaaaatggaagaattatgtactgagcaccattttctctgttgtttatgctacaattcaactttctctctctctcactctttctctaattagcaatgatcttctgtctggtccaaggtcacacatttccagtcttccagaaatgtctgttgaatctgttaatttgttgccaggaagaatactcaaacttctcatgctcatatttgagtgttagctgtctccagccagcatttctaagccagaccctttgtcaaggcttttgaataattttgtgaaaagtacccccaaagatgacagtgttcactgttggcagcaggactgtttccatgcagtagggctatgctgggtgtgcagtggagctgtgcacactgtgctcacggggcagattctgtgctgctgactctgatccctgtgcttgggaggaccgtgtccactgctgagtctacatctgaatttgattctcaagaaaaaggtcattcatagctattggacactgagtcacatagagggacagaaggtggctgaggacaccttatctctgatgagcataaggggattagatctgctggtggaacaggaagctgaagaaacctgtggctctaaacatggaatttccagccctgagtctctgctgtccgtgcccctctcatctgtatgttcctgggagatgtggaccacgggggttagaggtgaaggggattgggaagctttcatgttctctctcaccatctcccttgcttatctaacacactcttacacacctactttattggagcttctgctctacaaacatggctgagctctaaattagagacttttgaaagtgcagacggatgcaggaactcgtccatctggagactttccaccacttgaagcagtgaacacgtctgtgcaaggctcagaatttcaagtgacaggatgttgggatttcaaagaaaactaaatctttggatgaaccacgacagaagagggaaggttcacacatttccctgctgcttgggcctcagtgaggactgactcagccagtctcaggctcctggagaccgcctgggagatctgcactaggaaaccattttcagcacagcctggggctggtaaggggcccttactctgttattctgctgcctgataattttgcatccagagaagaattaggacctgtgagtccaggaatttcaaagcccatagacaaggtcccctcattctgccgtgacagcctcagctctgctttcccaaaaaaagagcatcttcccagcatgaagaaccaggagcaaagagggagcttctcccaggggtgagcagggcagaagccaccttggtcagtgggaaggaaacatgctcagctcacatctgacccagaatgactcagtcacacctgtgcagggtcacctgtgtgtgagcatcatctatttgctccatgagaaaataccttgtgtggctcttgggtaaaatcataccataggtgacatttctctgcctattgcttcagccgatgcttttcgtgattccctttaggacactggcataaggtaagcatgtcaggtgtgggacgtattgaacaggaaaagcagaggcttctcatatcaatgctcgtggcttgtatttgggcccatacctcatggaaatgggaaaaacagaaaagaaaatgatactctgctcaaaaaagcactgagaaatgctatagtattaatatatcgacaactcatttattgagctaatgaaatattaacatagatagatcatttttatagggggatccctaatccttaaacattatattaaaaatttgtcagcttaaaggatcattaaaaggcctatgtttgattgaaacctggagtactgtactttgagtcttctaatcagccaatgagtgcagggagctggctgccctcccaggtcctgactggctccatgtccaggtagagcagcgctccccacaggcagctggaggaactgacgaggggaagctgttggcatcagggcctcaaaaatttgactcaggattttcccacgtcccctccccaagtccaggcgggttccaggacactcagaagagctcatcattatgggtctaggacttccctggtcctgctcttctttcttccttccccagtggccttaagattgtcactccctgtcacaggcccttcctttccttgtcaagtgcactccctgaattctctgctcctgggtcaggaaagctctggaacttcagggaaagcagtgctgggtgacccaatggggacccagaaagctggcccagggccagatacacaggcagcagggtgggtccctacagtgctgcctggtgggcatcaggtagaggggagtgaccaggaccaactcccctgagtgtcttcagggccaggtgaactagggagggtctgggacctggtgtggacccatgcactgacccaggaataggacaggaaactcctcagagcaaggactgtgttttcctcatgctgagctcctgaaaagcagtcttgccaggatagagtgggccagggtggatatatgttgggtgaatgagcttctgtctctgttttattgcaggagtcactacgaaggtacgctggccctgtatttgtatccagaaccagtcaaagccacctgtgagtcctgcatccctcagtaccaagccccagtcccccttcaggaccacccaccacacagagagacagacgtgcagggagcctgaggaagaacctgaaacctcctctactacatggagtgtttgtatttccatcaggaatcttgagcaccttgtgccgggtcttgaggcaggaaggggccacacagagaagaggagtttcttccctgaggtcagcagtccatgaacgaagggatcagggacttgagcagcagattctgaagcaacacctggacccaggaggcccctgagcctccagcagcccgcgtagagtggccaccagggggcagcagagagtaacctggcagaagcacctggagatggggtgggcctgggcatcagggagatgcccacatgcagggagggtcggtgaccatgacctgagatctggagggaaagaggttcttcttttcttagagtatttgtccttgacaccgatgtttacattcttctggcttcctggttctcagatctgactcttggagatgatccttatttttctgacacacattcaggcactttgcctcttcccatcgacctggcccccatctcactgtcacacatgccatcccatcctgtagtcagacgtgtcccacctccctgcctttgctctgggagcccctgtcctgcagacacagccacttctccttccctggccacccctcaacgtccactgtccccggtctttcctgactctgttctggggaacctgccaattcgtagttcttgatttccttatgagacacacaatacttactcattaatcttttgttgacttaagtttttatccattgttacattttcccagcaacagaagacaacttagttataataaacacttacttcctgggtcttggagtttgcagccccctctcattttctcatgaagcaaacatttccttcacctcctgatctgtccctggtcctgacagcaccctggtgatactgaggcacagcacccatgacctgacactagaactcgcagccaaggtagaaacttaccgcatcccatggatcttccaaaattctatgtgcccttggcaaccaagaattgcattctcctctagcacagaggagctgtgccctggaatggggcctgtacctgtccaaggcttgtgccgtcccctgtgggagatgagaagcgtccctgcattgggctcttggggacccgtcttggacatgagtgagaatgaagagggtccctgcattgggctctggcatgtgactttaaatggatttaggcctgtaccagacatctcatgtctgacataaaatatttacaatcaggacattactagagaagcagaaaaaagctaaccacctccctcctgagccaggatggaatgaaggaggggactgtggaccccagataattcccctgtcaccactgtgactctaacaacctcttaaatcacggccaacatctatcccataggaaggtctttatatcccctagaaaatacagaggaagtcagctctgagcttttccacgaccaacccagccaaggagcaaggctgggcacaacctgggtaaagatgtgagcccagaccatgggaccagtgggtgaaggaaaatcgcatgggctgagggggtgggtaagcaggggccagccctcctctctctgtttcctttggggctgagtccttctctggaaaccacagatctcctccagcagcagcctctgactctgctgatttgcatcatgggccgctctctccagcaaggggataagagaggcctgggaggaacctgctcagtctgggcctaaggaagcagcactggtggtgcctcagccatggcctggaccgttctcctcctcggcctcctctctcactgcacaggtgatccccccagggtctcaccaacctgcccagcccaagggttctgggtccagcgtgtccttgattctgagctcaggagggcccttcctgtggtgggcaggatgctcatgaccctgctgcagggtgggaggctggtggggctgaactccccccaaactgtgctcaaaggcttgtgagagcctgagggactgcacctgccaggagagagtagtgagttttcagttcaaagtctccatacaacaggaaagtcatgggccactggggctggggctgattgcaggggataccctgagggttcacagactctctggagcttgtctgggacagcagggcaagggatttcataagaagcatctttcacctgcaagccaacctctctcttatttatttatttatttatttatttatttatttatttatttttatctttgcaggctctgtgacctcctatgtgctgactcagccaccctcggtgtcagtggccccaggacagacggccaggattacctgtgggggaaacaacattggaagtaaaagtgtgcactggtaccagcagaagccaggccaggcccctgtgctggtcgtctatgatgatagcgaccggccctcagggatccctgagcgattctctggctccaactctgggaacacggccaccctgaccatcagcagggtcgaagccggggatgaggccgactattactgtcaggtgtgggatagtagtagtgatcatcccacggtgacacaggcagatgaggaagtgagacaaaaacaccctcccagcctcggtcaccctcttgctccagccccgggaagcctgttgataaagccatgagtgaatctggcccagttcacctggatctgagcctttcaggttgcccttccctccagccccctccaggagtctctacagaagatacatcaggcataaatatggcctggaagggccagaatcatctggtgacttggggctgttgtgtgagttagagaatgaaggcttgggtggaaagacagacagaggcaacctctgtccactgtcctacccctggatggtcatatggtggggacagggcaagtccttagaccaactgtctggatcaggccccagaactactgcccagttctgctgaggtcctggcccccaggctgtgtggcagcctgtgattcccaacagagcaaaccagaggaatggacactgtgaagtctgcccagatcccctcctcaatgtgacccacctggcactgctgagaagcccagcagctcagagctgtgccctcactgggaagtgctgttggttgcagaaagcttcctcaagtttgtgtcccttttcagaggggttcggtttaatcaaccaagatctcaaatccttgcctcaatttaagatgccactgaatgaagggcctcccagctccagagctccctgtgtggatacctgaggcctcaatgtcaactccatcacgagtcagggtctccttctgccccgtgttgcctcccccactcccttctgaatcttctgtgcatggacatctctattgcagagttagcttccagagaaccccatctaagatggccagctgtccccaacatgggtcatcagggacctgagtaggccactataaactgaaaactctggtttctgtccaaatttgcagagtaaatgttgaaatgcccaatctgatggttccttgaatttttatggaatgaaaagggagcctgacatgccaggtgctctgggttgagggattgttggagtcagatctccctgcaggaaagcccggggcagggggagcagcctcacccctcacaggaaccacagatacacccacaaggtgagctgcaggatggatgctgcccacctccaccctccacatcctctgtaaatgttgctcctttctacaactccaaccagatatgtagatgtggcgaactacgtaaaatacggatcattcatcacatcaaaacccactgcaggacaccctggtcaacaaagaacccaatcacatccccatcaactacatagtttccaaattttccatctccagaaaaataacaataacaatatacatgaaaatcgatgtaatttatctcatacataatttcatgttgataacgtgaaaatgatagtattttgctctactgaaataaataaaatatatatatatatctgaatttatttgtcttatcttttcatatttaatgtggtgactagacactagggggtcacaggaggatcgtgtcataccactatgggacagagctcctcacaactctttcaggtgacaggtactgttgagtaacctgctgcaagcatccccatctccaccagaccatataagtgtgaacccaggaagaggcactggaacaatagagagaaaaacctgcttgtgcagaagacggtgcccttgagccctgctcctgctccatcctacgggtgccacattcatctcatggtgtaatatttcgtgccctgcctgagcttatgaccgaggggatatggcaggtctgactgtgtggttactggtgtctcatgaggttctggatgtaacaaagccctcgaatatagaagaggttgttttcaaaaggaaataattatctactgcacatgacatagacttgttgctaaatcccatgcgtctacactaggattctcctctgaagccttgccttaagcacaaggtttcagttcctatgtccagttcctctattatggtagagtctgctagtttctctggcccaatagcaggacactcactcccccacctgcacctgctgcagagcctttctactcttggccccaaaacactgggtgacacagttctcagacccatgatttatagtgtcagtattcaggcctcaggggtccctgatggcttctctggctccaagtctggaaacacagcctccatgaccatctctgggttccaggctgaggatgaggctgattattactgcaactcacataggagaggtggcactttccaccgtggtccaagttcatggggaattgagacccaaacctgccctgggctctcagcctctctcttgttctgaagatgcttcctcaccctgtgcaaggggcttcttgcagcactgccttgagaatttcccctctcccagctcctctcctttctcaccaggaagtccaaaaggaaacctgctctgtgatttctcatccaggacagtgacagcttcctgatgcttgtgtgctgtggtccctgaatgtgcaactcttcctagctcttcaaatgcaggcacatagtgagaaaagctgcctgactggtgcattcactgctgtttttaaggatgtcctcacccaaaatgcatcctcctcccaaattgtgaagaacaatctggacagaggtcattacagggagtttcaagaaactgcatcttattcaattgtgtccaccatggtctggtaaagatggccctcctggatggactattcctctgcatgtctgtcctgaagcagtgaccactgtgagaagatctgaacatgtttgtgaggtattaaggacgagaggaaactgttgtttttattattcttttgtttttgtttttgaaacaaacttttgctttgtcgccaggctggagtgcagtggcagaatcttggcttactgaaatctcagcctcccaggctctaccaatgctccctgcctcagcctcccgaagagctgggataacaggtgaccaccaccatgcctggctgatttttgtatatttagtagagacgggatttcaccatgttggccaggctggtcttgaactcctgatctcaggtgatgcacccacctcggcctctcaaagggatgggaatacacacaggagccactgcatctggcagtgttttttttatttttgctcctcctctttgcctcaatacctcaggttgctgagctggggagattttgcgtgacaggctcagtgctccctcaaaatcctcccgtctcaattcgctggggccctgtcctggaaactccccaaaagtggatggtgtccctataggttgggagtttccaaaatggccccacagggaagagttaacgtgagtccattccttcttcctcattgacatccagcatttgtaatttccatgggtgtcaatacttttgtagctgaaatctttcttaatctactaaaggtgagaatgaatttaataaatattcagacattagttgcatccaatatttaaattttatgagtcaattggtagacatagccattattatatataatttaggcttcataaactttgattaaataggttttattaaaaacaaagtaaccattttattatgtgtttagactatatcaacatgttgtgtacctgaaatatccacaagaaaatatatttcaaaaaccaaattgtatttattgtctattgttgcataaaaattgctccctaatatttagcatggtaagagaacacgtgtttgtgatcttgtcacttcggtgcatctggaattgagagcagcttagttttgtggttctggttctgggttggtcatgaagttgcagccaagctgtcaggccaggctgcattcagaggccagagcaggtggccaggcccagcctgaggggcttccactgtccctaacctgtttgtctgatgtggaaaatctcagaggaaaaggagagagtgaagtgtaaggcacctgtcccagtcccccttgtcaaaggccatcccatacctgcaccatttcttattctttcctggggcgtcataggcatagagcactgcccattcattctaacgctgtagagtattctgtagtaggattttagccatgcagcctctaatggttatcaccatgattttgatcttacaaatcacactgcagcaagcatccctgtgcagactcctttgagttcatgtgtgcatatcaccataggataaatttccagaagtggaattgctgggtcaaaaggatgtgcatttttaacttttatccattgttttcatattcccctccagttctaccagtttacaataccagccctaaatattgattggaattcattggtgaaagtgcaagtttgtgccaacctatcagatatacaaagttatcttgttacacatttatttttgatttctcctattttgcttgaggttgagcatttactcaaatatttcagtgctcattatgttttaggatttggtaaaccgtttcttcaatgcctcggtaagaggtattttagtctttgccatgcacaagacaacgttgggataatatgtatgttctgatacaccatctacaacgtaatcattaaaacatataaaaaccactatcagttctggggccattaaaaaaattggtggcaggccagggatgtcccacaggatgtggtttaacggtctctggtttctagggttatttgaagtttgaacattgcacccgcatatgttctatgtggagatctctttgtgagggacactgtaattcacctcctctaggggcctgaggtctttctttggataagaacctacctgtaccatgtgtttgattggatcttgtgtctgctcaagacagccctgtgtcacaagctcatgactttcatcttcatccatttgctctgttttgtgagagcttcagtatatcaggaatagagattcctccgaggtgaaaaattagaggcagagggaggggcaaatgggcaaggaagcttgcaccaagtcgggagtgatccagtgtaggctgagagaaaaaaggtcttaaaatcagccttgtagctgaaaccaaaaacacacaagatggttggtgttctgagcatcattaacaaatgataaatgaagttgaacttttaaatgtattgcaaatttttataaagcaagtagatcgttaaactcagaatgcaacaatggaataaagaagagagtttgagatgtttttaaaatttatttatttatttatttatttttgagatggagtctcactctgttgccaggctggagtgcagtggcacaatcgcggctcactgcaacatccacctcccgggttcaagaaattctcctgcctcagcctcccaagtagctgggattacaagctctcgccatcatgccaggctaatttttgtattttttgtagagacatggtttcacaatgttgaccaggatggtgtcaatctcctgacctcatgatccacccgtctcggcctcccaaagtgctgggattacaggcatgaactaccgtgcctggctgagtttgagattttaactgtaagtcctccaactaagttgccatgacaagaacagggatgatgagagtggaaatatgttatcctgcaaattatcgttttatgtaaaagaatattttccctcttttaggtaaaggaagcatcttctggagcaccttctctctgactatcaaagcaccattaagccacaaataaactgtaacatgaagtaggaaacaactgcccttttatataaccattgagaggtggctttatatgcataccaaaatgttgatgctcaatgctaaaattggatttagtaatttaatatgcctacaagaaattaattttctttggattatattatttctgtgtacgatttatcttagttaacttggaaatattctgctctaaaaacaactcttgttttttgggttatattttctgtatcaactatagctcttttccaaatgctgtcagagatagcccatggctactgatcacaaaattcaattttatggcatttaaattattctatactctaaattattttaaaagtgcacagatgtgaatttttcacatctgactcaaaaatgttgctgatgttgactcacttttttatttcaatcttattgaagtaggagtttacttttctggaacctggatgataacaggagactggagaggaaaccccccaaattgttttcctttaaaccctcaggatgaatcatcctggataatcacccacacttgatttgggtgatatctaaatgagagttgggtcttagagtaggtgctgagttagtttaggacttgcgctgttggaatgagttgaatgtttttacaagtgagaaagacatgagttttttggagtccagagggtggggggttattggctgaattaagtcccccaaaatgtatgcattgaagctgtaacacacaatatgtgactgaaattgtgcatagggtctttaaagaggtgactaagtgaaaatgaaaaaattagggtggattcttctcaaattggactgatgtcctcctaggaagaagaaatttgcacacacagaaatgaggcaccagaggtgagcgtgcagagaaaagaccaggtgaggattcagcaaggaggtagcaacctgcaagccaaggagagagtcctcaggggaaaccaaacccactaccacctttatcttgggttttccagcttcagaactgtgagaaaatatgtttctgccatttcggtcactaattctttcctatcttcttgtgggagctctagcaaaaacaagagggaccccaaagaccttggatgagggagaaggaggagatggagcagggtgcaggaggcggtgcaggaaggggctggaaggtcgggctctgaggtgcatctcctgggtggaatcttgactccactccctattgtctggaggacttgggaaaaacatttaacctcctaatattcactcactaataaagatgggcttgaagcacaaggctccccatcatcctattctatattacaaaagtcttcttgaggtaacacttgtaaaactctcgctaatgcatctggcatgtattatggactcataagtagcccttctgagtgatctagtgatgtgcagaaaatggcattcatgctgtgtgcaccagggggcactgtgaggtttagtctgaggcccctaatgagtccaagcccctagtaatgctcaagggcgaagagcctgactgttgcttcctatgaggccccttctagtgggtaaatctgaaaatgcacttggcccttcttctgatcttgagaaattactcagagaaggccatcaggctcagggctcagacaagaaccaggacaaatgttttagggaatggagaacagatttgcatccactgctcaccagagccacctaacgacgacacaagaataaaggaagtagatttgcatgaagagacttcccttcctatgataagagaggcctggaggttcctccttagctgtgggctcagaagcagagttctggggtgtctccaccatggcctggacccctctctggctcactctcctcactctttgcataggtgctgcctcccagggctcaaccccatattatcatgctagctgtgccaacctggccctgagcttcggctcaacacagggagtagtgtagggtgtgggactctaggcgtgaaacccttatcctcacctcttctgtcctcttttgcaggttctgtggtttcttctgagctgactcaggaccctgctgtgtctgtggccttgggacagacagtcaggatcacatgccaaggagacagcctcagaagctattatgcaagctggtaccagcagaagccaggacaggcccctgtacttgtcatctatggtaaaaacaaccggccctcagggatcccagaccgattctctggctccagctcaggaaacacagcttccttgaccatcactggggctcaggcggaagatgaggctgactattactgtaactcccgggacagcagtggtaaccatctcacattgacacagacagatggggaagtgagacagaaaccccttcactatctgtgtcatcctctctctccagccccagcaggactgtgaacaaagccataaacagggctggcccagttcacctgcatctgagacctccaggctgcctttccctccattcctccaggtaggctctgcagaaggtgggtcaggatgatgtgaggcttgaaggaccaggctgttctgctgttgtttagactgagtgtgccttgcctcaagatgacctgaatggaaggaccacaagaaggagatgggcagctgttgagtggtcatgatccctggagttcctcttgtgtggtgactggatctaacacaatgcctgtactttgtggcccaaatgccctggattattggtctgaactccccatgtttaactgagaccctcaagccccagctccatgcatcctgatgttctgaacaggaaagtcttttctagtgagcactgtggcatcccttggcatcccagcttcacacagcaattccccaccaaaaaatgcctttgagtgcaaagaacggcttcatgcaaagatgtgcctccttcagaatgtagttcaggagcaataactacctgatgccttaatcccaaagccatattttaatttagaatgaccttgaaatgccttctagctgagcagtcagttgtaacacattcccagtcacgcctcccacacttctttcctgacagtatgtcatgaaaccctactgcatggaatcctgcctcttagagtaggattccagggatctcaaaaattgtttagaaatgaacaaaaacagtctagttggaagagtatcaaagaggaggcagttgcacatgcagagaactctgaggtctgcaaatatacatgaactgatgagcacttgtgtgtaaagaaacacctccgaaagagaaaagaaccacgcaaagactcttgagggaacacctcacagagctcactcccacacacacccacccacgcactcacagacactcacacactacagtcacagaggaaaggcctgacttacagggcatgaggttgactcatcagaagagctttgcctcagtactggggaaaaagtcaccctagacaaaatgctgctcaggtctcaactatgaaagtgtaaaagcaaacagaaaactcaaactgtttttctgaacagtaaagtaactttactgaattcaacaataaaagacagaaatagagaatgaactgcaaaagaattctcaacccagcaggaaaaatgcacaatgccttcatcctgtcaatatttcctgcaaggtaaccagaaaatatatgctatatcaaacagagaagtgaatcaatcccaaatggcaataaaattgcacacatgatagaccttgtaggcaaggatatgaaagaaattcttataactctattctattctacttgttcttgaggatataagattgaaaaatcatattaagtggatacataaaacatataaagacagacgcaagttatactcttataaatgatccataatatgtctgcaataaaaaatacactgaatgagactgattgcagattggattctgtgaaagaatagatgagtgaacttgaagatatggcaatggcagctattcaagacgaagcacaaaagcgtaaacagagtatcagtgagttttaggacatcttcaactgcctaaattggtataatgaaagtcattaaaggaggtaagattggacagggaagagaaaaggcagaaaaacaatttaaaggaacaatgaccaaaatttcccaaattttgtgaaaactagaaacctcctattccaaaaagtttaacatgtcccaaagacacacacacacacacacacacacacagagagagagagagagagatagagagagagagagaaagagagaaagggagagagagagatacaggtgaacaacaaaatgacaagaacaaatttggtttttaaaaatttttttaattttagtggcttcatagtaggcatatatttttattgggtacacgagatgtttcaaaacaggcatgcaatgtgaaatagccacattatggaaaattcggtattcattcactcaagcacttatcctttgtagtataaactattcaattacactcttttagctttataaaatgtacagttaagttgttattgactatagtcatcctgttgtgctgtcaaatagtaggccttattgattatttctaactagttttttcttacccagtaaccatccccaggtaatagttgatttcttattagaagtaatgcaagcctaaatcagtggagttacatttagaaaatattaaatgaagaaacttactacccaaagcaatctacaaactcaatgcaattcctatcaaaataccaatgatattattcacagaaataaaaaatcctctaaaattggtataaaaccctaaaagacgctgaatagccaaagcaatactgagcaaaaagaacacagctgaagatatcacactactagaattaaaatatgctacaaactatagtaaccaaaacaggaagttattggcatgcaatcagacactgagaccaatataacaaaatagaaaacccgtaaataaatccatatatctatatatagctgactttcaacaaagatgtcaagaatgtacactgagaaaatggcacaattttcaataagtggtgctgagaaaactggatacccatctacagaacaatgaaactagacacttatcctctccacaaaaaaatatcaactaaaaatggattaaaggcccaaatataacaccccaaactataaaactactagaagggaacttaacataggggaagaacaaattctttaggacattgttctagataaaaaattatatggccaagacttcaaaagcacaggcaacaacaaataatagagatatgggacatcattaaactacaaagttcctgaaaagcaaaggaaacaatcaacagagtaaagacaacatgtagaatgagagaaaatatttgcaaactgttcacttgacaagggcctaacattcagtgtatgaaaattttaaaaaaactgaaataactcattagcataaaaaaactaataatatcattaaaaatgggccaagaatttgaagagacttttctcaatagaagatatacaaatggccaacaggcatacgagaaaaatgttgaacatcactaattagtgagggaatgagaatcaaaaccccagtgagatacaatctcaccctagctggaatggctatgatcaaaaagacaaaaaatgcaaagctggtgaaggtaggtgacttcacatttctctagtccgattctctgggaacaatgagagtgctctgtctttgctctccctctagtaactatttttcacacgcaaaaatatggaccctagtgggaaataatgcctaagaccaccaacaccttaatcatttgttcatcacactagaaatgaaactgttttccaaataatattaacatctatctgtgtctatcgccattgtgtcaatgtctgtgtgatcctataacatttagaaggcctagaagaatgcccttgctttttgcaatatgaaaatggccgatatcatagatgatatagatatagatagatagggggttgtattttgaaatgtatttctctaaaggacttctttcacttcaaatttgaaattattcttgttttaaatgtcacaaatgataaaccttatagaatgataacacaattgtatgtgttataaagtcacagggtctatcaaatgatgaaccaatcattcggtgttgaggttagtagtattttttttatttcgattctcactaaatgagaacacgttttgtattgaggggccatgccctaaccataccacatcgtggggttgctcagagactgtgaggttctgcccacactaagccagaaggagaattttattcctaagccaggatgagaattttattcctcacactgctctctgcacttgtttgtatcccataatatcccccaaaagtgagcatgagaagttcattttttaagctgcttgttcattctcttacatttaatacatgtaccaaaaattgtcttcatttttaaaataaaatgttatgctatcttgtaatctataaccctatagaataatcttgatccatacacttttgctatcacaagcagaacaagatccacttcctctctctgggataaatcccatgaccgctgctctttgagcattatttttcttaagttattttttaaacagaaatttatctgacttaccttaaccaaatgtcttttcaaagtaaccgcatttcttttaagtgaaaaattaaatagttaccttctgttatcaagaattatctgaatacaaaatatttattgtttcaactttagaaggaatgaaaaacatctacaggttactaatctaaaaatgcaggctctgggtttctatggtgttaacatgtcttccaaattttaagtaacaggtatttaaataacatgaactttgttttcaaacttagaaaatgtttcaaccttttggctgggcatggtggctcaagtctataatcccagcaatttggaaggacgagctgcgagttttgtctgatcccaggagctcaagaccagcctgggcaacatgatgaaactccatctctaccaaaagttataaaactttgccaggcatggtggcactgcctgtagtcccatctactcaagagactgagatgggaggattgctggagccagagaagttgaggctgcagaaggtaaactgtagaggctaaaacatgataaatatttaattcatcacttaaaagaaatgttggttacattgaaaagaaatttgattaatgtaattagatatatttctgtttaaaaaataattgaagtaagccctgttagcaccactgcattccagcctgggcaacagagcaaaacctgttaaagaaagaaagaaagaaagagaaggaaggatgaggaaggaaggaaggaaggaaggaaggaaggaaggaaggaaggaaggaacgaaggggaaagaaaaaaaggaagaagatatttcaagctttacagtaccagagccactctgtaatcaataagcaacaggaccaaaacagaaagagattctgtagaacagtctaaccagcgatacaattatacatttctgttcagatatcaaaaccattttcaatagtaaatatatggaatgaactccccacagagatcaagtaggatgtatgatgtgtgaatgaaattatgagttgagagtaggaaatttataaatttaatcaaacaaattaaagcattatgaggaagttgtactgctaatgtattacttggcaagctgttcagtggaacaccaagatattcttaaggaagttgcaaatatcttttaaaatgttatcattgaagtggatttttaaaaaatgaggacatgaatacctttacaaagtattcagggataaagagagaaaaataaatttagattgtgcatacatatataaaatttattttaaaagataagcttgtcttttttatcccttaaataaaaggagcagatatttaaattccttgtcttttattttaaaatttagaaaatgcttacagcttcccacactgaaatttatactaagacagataatctaatcaagggataacaaaatcaaaacagaattctcttgatgaatctattttcttgatttttaagtctcagtgtgtactctatagtaaaactatttataattgattctgctgtttgaaaatatttactgatcgtttatcttgcaccaagtgatctccagctctgaagataggtcagtgggaaaacatacaaagttgcccagcttcgttaaacttaaattctaatgaggaaaaaagaagtaattaatcagggactttaaaacaggagtgttgtgatatggcttggaattctaactgcttcctgtgcttgctgtgtggagactggattgaaaaatagggcgatagaagcttaaattcatatagaatatggctagcctgtattttgagggcccctgaaataagaatgtatagtagttctcattatttcctcaagaaatctgtgcagtagagctttggccttgggagggaagtactatagtcaccaagtggtgagggtgggaaggtgaatttgcaaataccacttggaatgagttcactttaaaggtaaagctggcaggattttcatacatgtcagatctgaaaaaatgtgtgtgcgtgtgtgtgtgtgtgttatagagagagagagagagagagagtgaaaaccagacagataccgagagagaacgacagatctgcagtgacagagagaattaaaagcggacaccacgaatattgagctcagaaactataaaatgggaggtgccattaaacagaatggggaagagcaagtttgaggagtatcagtggctccatgtggacttattgattttgacattcctaacagatgtccaaatggagaagtcagacagtgttgtgcgtagtctagtgttaaggtatcaaagaaaatatcaggaaatgagtgacacaaaaattagtaagaaagcaaagataagaaacattagtcaaagtcctgagtccagtggttatctaacacccaaaaagtagtaggccgggtgccgtggctcatgcctggaatcccagcactttggaaggccaaggcgggcagatctcctgaggtcgggagttcaaggccagcctgaccaatatggagaaaccctatctctactaaaaatacaaaattagccgggtgtggtggctcatgcctgtaataccagctactcaggaggctgaggcaggagaatcgcttgaagcagggaggtggagggtgtggtgagccgagattgcatcattgaactccagcctgggaaacaagagcaaaacttcatctcagaaagaaaaaaaagtgataaagacaagaagaaaccagcaaaaaagtactaggggtaattatcaaaaatgtcaaagggaaagtaggttaagtgttctggaattctctcaaagaaagttttgaaaaaaggagggaggaagagatcaactgctttcaatgctgctgatacataaattaagacaaaggctgaggaattatgcttcaattcatcatttaacgatatggatattgtttgtgctttgataagagcaattttcttggagtgagtaggtgagaaaccatattggagtggtttctcaaaggaatgcctgatctctggattcttaaggaaactttttattgaacagtggaggcacaaattggatttgttttaattccggggtcgggacacactctaaacatgtgcctctgcatgcctcgcttattacagctaggtatcctagtatctttcagtaacagaataatcacctgcaaaacccacacccatttaatagacacgctttacaaagactgatactagaagttgttggagaggatgtggttccacgtaatatcttatgagtcactgatgggcaagtaagctggtaaaatgtctttggaaaactcactatacctgctatactaaaacattcagataccaaacaccagaaattccatattgtaatatatttctatgagaaaaaaacaagagccctgtattaaaatatagattattattaaaaataatcacactgggtttcctgatttttttattagcaagtcagtctctgcctgattcaatagtacaacctctatctaatatatatatatagtgtttttaatcaaccactaagaaaaagtattatattttatatcaattctacattcagtgccgaaaccagcattttgtagattccagagatttgttgaataaataatgaataacttaaataagttaatatttatagtatccatatacaaataatacatcatctcagaatacaataataacgtttgttatgcagaaaatgatttcaatctcagttaaaaatattttgggcttaggagttactgtcatatatggatgctcacattgttttgtttatacgaaaatgtttgtagttaacgtacgtttttggtacttaagccttttgttcttgctgccatagcaaatagtgtgcctattaggaacaagaaccagaggtttacttcatcttaacagatttcttaataaaatacatgccatactgtttggtttaatgcataagcaaagagtcattcactccgccattgctacgtgtccctcctctaatacggctcctgaagatgttaccgatagcagaggactttgtgttcaacctaagcactttatagccctttcactttcaactaagtatgagataaaataattcagcaccaataaaacaaacacttcttaaatactgaccctttttttgagcctgtttcacgttacgcagcaagacagagtacacttctctttcccagcaaatcagtgttggcactacaccctctacactctgaaaacttgtattattggcttccttagaaacacaatttgagcttataatttagatgtcatcaaataatgtacaaaaatatgctacttccttccccttcacttctcttctcttctcttcttatcagataattgtcagttgttttttctctccaactcctttcctccgactacctgatttttaaaagactttctgcacatttccaatcttagtattgtagagacaaaatgtgtggtcaaactgcatatataggaagagctgaattatatgcaagcatttttaaatacacaattcctcctcagttttctgtgattatttcatataatcaaatgtcttccagatacacatcccaaacgagtggttgtcaagctctgctttgtggtctaatttcatcagaattatccaaaattcttatgataaatacagataaattgacataactccagatttatgaaatcaacatttccagaacccaggaatatgcattgaaaaagtgtattcctcagatgatgctgacatgatacgggatccgagtttacaatgcaaggaaaattaccttccttgcccttcagctgacccttgtatccagaggtcctcttcccctttcatattctgccctctctccttctgcacctttctcctttcctccctccagttctgctcatccagatcccaagccctcccccatggattccctaaacctcccaaatggtcagttgccactaaagttccctctgtctcatgaacaagttatgtgggcaaatgtaaaatttaagcttggaccaagctgactcaagagcggcaattacaaatttccctaaacccagaggggaccagcaaacacttgtagaagattagagatttcctgtgagtgcaaagggctcagagtgtcctgatgctgtagaccaaatcttactgtcccctccaattcatgtgttaaaatctaattccctatgtgatgggatttggaggtgaggccttggaaggtgattaagtgatgaaagcagagaacccgtgaaggggatcagtgtccctatcaaagggacggctgagaactcctcatcccttctgtcatgtgaggacacagtacaaagatggccgtctatgaaccaggaaggaagccctcaccagacacaaaatgtgctgaccactcactgctgactccagtgagtcagaggagcgcaggccacatacctgggtctctgcctccatgcctcccacagtgcccagggctgagagcagagtggcagctgctgactggggctgtgctggccacctgctctcttctacctcttgctcaagccatgctttcagccccatggctgaggccagtggctagagcaggtgccatgatgtcaggcagctccttaatgggctggtccttggcaggaccagggcaggggcaggagggctctgcagctgcctctagctccagttctgtccctgaagggggctcttcccctagtgctggcactggctcatcagctggtgctggaaggtcctggattgccgcacattgagcaggagatgaaaaagaagaaagagtcaccaatgtcagtcactttccactggaatttccacacacagaatcagcctcactgaattaaaggaattccagtccaaaaacactgcccccgcaaagtctccaaaactacaggccccccctcaccatgtgcctgtgcctggaggaactccagaggctccagcaggccaaggacaatgcacggatgtggcccggatgggatcaccagtgaggcctggcctcgtagggcctgcccagggctgtcctgtggtacctgggtgcgccttcggccagaggtgcctggggtgaggaatgagcctgcatcggcatcatgggaaaaggctgtcactctgggccctcctgaagcaggagcctcaagatatgcggatgcagcatgagaacatcttgctctcctgagcatctcccaccaagggaactggctgcgggactgtctctaggatgtgggtgcctggttaccagaattctaagttctgtgagggtatatcaccaaggaagtgaagtcacttctttaaggttccgtatcctcagccccttccttccataagacctactcagaaccccctgggctgctggctgctcaccctccccccaggccagatccttacctgtacacaggtaagtccacccagggcctgcttgtacacgtgctcctgatgtgcacctgggacctaggaatccacttagggcctgtgatccaacaggggcctaatgttgtttaaaagtaatttttattattcctacaggaaagaaaaggccttctagcaataagaagcacagtttcacatcaaaaacataaaaatgatcaaaatcttggggaagaaatgtatcaattttaatcactgaaatgttaacttttgataaatatttaagtttataaggaaaaataaaaccatgctgataaaaccacagttgtagggaatgctatagagtttctcctttgtggtttgaacacagaaaggtcccacctagttaggctcataattttctaccttaatcttcttgttcttatgattaatggaaaaaataccatgacaatgatggtgatgatggttcaagtacacactgaggtttagtgacagaaacatcaggtgctcccagttacagtgcagctgttcttattggggtgggaaaatcaatcttgtgttcagtatacacgggaagcaggagtacatgtggatatgaccacatttcactggacttatattttaaacagaagatctacagtttattcttcaaaaaataataacacttgccatgcaaagtatatatataagatgtctcaaataattgtacttacattgcatatgaaagtgatacattttgatatgctaggtaaataaagtaaattatttaactcatttacttcttccctttgtatttttaatgcgatgactagacattcagatttccatgaggctcacatcatattgtgaatgaacagtgctggtctgcaccccttcaggttacaggggctgaggagtgacctggtgcaggaagccccatctccatccataggacattggtgtgaacccagggagaggcgctggtgtaagagagatgagaacacaggtgtgaaccacctgcttgtgcaggggactgagccttcacataagttgacacttaaaaagccaccacaccccacccttgtcaacaggaaacccattcacatctccatcagccacacaatctccaagattcttcaaaaagtaataacaatagccatgcaaagtatatgatatatatcataaataattgtacttacattatatatgaaaatgatactctttttgatatgctaggtaaataaaatacattatttaaactcattgacttcttctctttgtatttataacatgacaactagacagtgggattcccatgaggctcacatcatattgtgattgaacaaggctggtctgcagggcttcaggttacaggggctgtggagtgacctggtgcaggaagccccgtctccttccataggacatcagtgtgaacccagggagaggcgctggtatgagagagatgagaacacaggtgtgaaccacctgcttgtgcaggggactgagccttcacttggagccaaagttttctttcccaggttcaatcctgaacaagagggccttctggacttctttttgttttcaggcttgtgccccttcaggtttggggctgtctggatcccagccaggggacactgaggaaatccaggagtctcacactgactgttctatttcatctgctggggccatcccaaactgctgtgtaccatttcctttcctggtgctcaaatagctgctccatgcccttgtcatggtttcagagatgaatctaggtgggaagacaggacagtgtatgttataatatttaaatggaagctgaatccattaatatttattttaatatgaaacattaaaagaattttgtcataagcaatgaggaaagaggaaaagatattcaagttattttgagaaaaaataaaaatgtatttatcaaatgtctgtgtgtcttcagtgtcgcagggttgagagcagccagctttaggttgccctgaggatgcgctcagatgggaaaaagcgagaaagcaggaaacgcgtctctgtgacctgacagataaatcacagtaatggaaataagtctttcaataattcaaacattcacaataaatatcactctgatgcacacagaaaggcctggtaacaaactttccctttgacctgctggctcatatccccatggatcacctgtgtgcagagtggactctctggtccccatttctcaggctgagaactagaggctgggaaggacaagtggcctgctcatgagtgggaagggcgggattgggagcagcagactcgggctcaggactctggccctggtcagtgctccttgttccctccacagggtccctcccacatgtgcccgtgtggatgtgggtgcactgcctggggtggctgatgtgctccagggattcaatgcggcagatgcttcagcaccaaaggtagggagtagggatgggacgaggctgcagctgtggagaccagggacccatgatgcccagcagaggtttccacggggtgggtagccccatttcctgacagtagagacagcctagaggtgggtgccaagcagagggcactgtgccatgtgcccaggcctggagggccacagagacacaggcgccacacagcagagacactgagagccaggagctcactcaggtaagggatgtcagcagatctttctctcctgagcaaatcaggtacaaaaaaattaagatcctgccatcagaatagacaaacagggactttaatctcctcggctgagccccgctgtccagggaagaagaagtctctgagcccaggcccaggtgagggtggagtgaggagaggagctcagggtgcagatttgcataaaggccccgccctcctctgaggcagaggggataagacagggctggggtcaggcccagtgctgggatctcaggaggcagctctctcggaatatctccaccatggcctgggctctgctcctcctcaccctcctcactcagggcacaggtgaggcctccagggaaggggcttcggggacctctgggctgatccttaactcctgctcctcaggctcacctgggcccagcactgacttactaaaatgtgtttcttcctttttccaggatcctgggctcagtctgccctgactcagcctccctccgtgtccgggtctcctggacagtcagtcaccatctcctgcactggaaccagcagtgacgttggtagttataaccgtgtctcctggtaccagcagcccccaggcacagcccccaaactcatgatttatgaggtcagtaatcggccctcaggggtccctgatcgcttctctgggtccaagtctggcaacacggcctccctgaccatctctgggctccaggctgaggacgaggctgattattactgcagcttatatacaagcagcagcactttccacagaggtccaagttcctggggaactgagaccaaaacctgccctgggctctcaggccccctccttgctctgaagatgcttcctcgcccagtgcaagcggcttcctgcagtgcggccttgagaattcttctctctcagctccttccctttccaccatgaattccaaaaggaaacccgctctgtggtttctcatccaggacagggacagcttcctgatgcttgtgcgctgtggtccctcaatgtgcagctcttcccagctcttcaaatgcagggacagtgacaaggagctgcctgagtggtgcagtcactgcttttttcagggatgtcttcaccctacatgcatcaccatcccctacactgtgggtagaattttagcaactacattctaatggttatcgccacaactttgatcttaaataacagtgcagcgaacatccctacgcagactcctttgagttcctgtgtgaatatgaccacaggattcatttctaaaagtgaaattgcaggtcagaaagattgtgtgtttgtaattttcacccattgttgtcagattcccctccagagggattgtaccaattttcaatgccagctggaagtacttgttcagagtacattgttgaaagtggaaatttttgccagcttatcagacagaaaaatgttaccttgttacagttttatttttgagtctcctgttctgcttacattttggccctttcagaaatagttcagtactttttctttttttaggatttagtaaactttataaaaaatatccagataaggagaattttagtgtttgtgggcaggcacagtggctcacacctgtaatcccaagcacttcgaaagagtaagacaggtgaattgcttgttcccaggagtttgagattagtctgggccacacagcaaaccctcatctctattaaattaatgcaaataaaaataaattttaaaaagaattattttagtctttgtggcccaagaatcaactttagggatattacataggtacttataacatcatttacaatgtaaccatttaaaaagataaaaatcactgttatctctgggccatgcaaaaacagttgtcaggccaggagtggccacaggatgtggttgaacggtccctggtttgcagagttatctgaatgttgaaaattccaccagcatatgatctaggtggggatctctctgtgagggtcactgtatttcacctcctgtattcggctgaggtctttccttggataagaacatgctcacatcatctatttgatgggctcatgggtttgcccaagacaaccctgtgtcacaatcacataacttttatctgcattgcttgttctgagttttgggagagctttaatatatcaggaatagactcctcctaagggaaaagtctgagggatatggatgggcaaggggtcaagaaagcttctaccaaagctggaatatccagggcaggctcagagagaaggatcctaatatcagcatttgactgaagccaaaaccagaagagaacatggacgttctgagaataataagtaaataaacagtttaaattttaaatgtattgaatattcttatactccatgaaaattctagaacggaatttaacaatgggataaggaagagagcttgagatgttaaactataaagaccacaaggcaagttgccaggaaaagaacaggacctttttagtggaaataggtttctgctgcaaattacctttcctatgaaattggtttttaggtataaggaaacatcccatggaacattcttctttcctacagtcaagatcaccctcaccccacaagggaacctcaatatcaaatagaaaaaataatgcactttgtataaccattaggagagtctttatttgcacatcaaaatgaggatggttaatggtaacattggaaatagtagtttaatatgcataagtgatgaatttcttttgactataccatttctgtctgtgatttatctttcttaatagggacatactctgttcttaaaacaatttaacttgtgttatcttttgttctattatctgtatcagctctgttttttttttcaaacactggcaaagttattccatggttaatgattattaaattcaatttatggatatttagattatttaaattatttcaagagtggacagatgtgatttccccacatatacctcacagatgttgctgatgctgacttgttcatctcttccaacctctgcaaacaaagtgggaaattggatttttctgaacacccagatgacaacgggagaggaggtgaaacccccctaaagctgttatcctttaacccctcatggtgaatctcccatccacacttgagttggatgatatgtaaatgagagtttggtcttagagttggtgctgagttagttcaggatttgggttattgggatggagtgaatgtgctttacaagtcaaaaactatgagtttttgtgtgcataggttggagagctcttggctgaattgtgtcccccagaattatacaatgaagttctaatgcacagtgtgtgactgaatttggagacagcctttacagaggtgattaagtgaaaatgaggtcatgagggtggcttcttctccaatctgactggtgttctgagaagagaaaatttgcacacatagaaatgagacactagagatgagcatgcggaggaaaaaccatgtgatgacacagcaaggaggtagccacctgcaagccgaggagagaggcctcagggaaaaccaaacccaccaacacctttatcttgactccccagcttcagaactgtgagaaaataagtgtctgctctttaggccagcaggtctttggtatctcattaaggtagcactagcaaatgaaaacaaaagggaccccaaagaccttgggtgccagagaaggaggagatggaggatggtgcaggaggcggggcagggaggggctggaagttcaggctctgaggtgcatctcttgggtgcaatcctgactccactcactgctgtctggggacttggggaagaatcattaacctcccaatattaattccataataaagattgggtcttgagcatagggctgctcatcctcctattccatatgatgcaaatcttcttgaggtcatgcttgtaaaacactcagcaatgtatctggcatacactatggcctcagaagtggttattctgaattttctagtgatacatagagaatggcattgttcctgtgggcagaggaggcactgtggaccttggtttgaggactcagaaagacaccaagtcctctggtagtgctcaagtgcgaagagcgtcacagatgcttcctcccaggccccttctattgggtaaaatttactctccactcctgacacccatctggtccttcttctgaccttagcacattatcagtttgaagacttaaggctcagggctcagatgggagctaggacaggcacactggggaatgcggagtagatttgcattcactgctcatcagggagcccacccaacaaggatacaagaataaaagaagtagatttgcatgaagagcctctccttcctatgataagagagggctgaaggtccctccccgctgtgggctcagagacagagctctggagcatctccaccgtggcctggacccctcccctgctcaccctcttcactctctgaactgcctcccagggctcagcccccaaaggaccagagatcagcctggacctgagcttcagctcagcacagggagtgatggagagtgtggggtctgggaatgaccctcatcctcataattacctcttctgtcctctcttataggctttgtggcttcccgtaagctgactccagagccagcagtgtctgtggacagtcagcaagggtaacctgccagggagaaaacctaagaagccatggtacaaactggtaccagcagaaccctgccagatgcctgtgcaggtcatacatggtaacaacaaccagccctcagggatcccagaccgattctctggctccaagtcaggaacacagccaccctgaccatcactggggctcaggttgaacatgaagctgactattaccgtcactcatgggacaacagtggtactcatctcacagtgacacagacagattggaaagtgagatctaaagaccttcactgtctgtatcaccctctttctccagccatagcaggactgagcagggctggcccgggtcacctggatcgaagcccttcaggctgcccttccctccagccctcccggcagactgcagagagtaggtcaggataggatttggggctggcagaaccaggctgtcctgctgttatttggaatggatgtaccttggctcaagatgacctgagtggaaggacagtaagagggagacagctactgagtgctcatggtcactgaatttcctcctgtgtgttgactgaacccaagacagtgcctctactctgtggcccaaataccctggattatttctctgaactgcccatgtttaactgagaccctcaagccccagctttgtgcatcctgatgttctgaacatggaagcctttcataatgtgcactgtgacatccttcagattcccatttcaggacttatgcacccaccatccacccagggctgcagggagttcctggcttctcacagctcttccccaccagaaactgccatgcagtacagagaatagctttgctcaaagaattgcccatttcaaaatgtgtttcatgggcagtgactccctgattgccttaatctgaaagtcatgctttaatttaagaccctgaatatcaaattgaagtgccttctagctgaacgctcaattgtaaaacattcccagtcacacactccacacttctttcctgagaatgtatcctgaaaccctactgcatggaatcctccctctcagagtaggattgcagggaactcaaaaattaaaaacaaacaaacaaaaaacagtctagagggaaaagtattgaagaggagagagagagtgcacaaggagacaactctgaagtctgcaaatattcatgcactgaagagcgcttgtgtgtacagaaactccctctgaaagagaaagacccttgagggaacactccaaagagcgcgcgcgcacgcgcgcgcacacacacacacacacacacacacacacattccagtcacagaggaaaggcctgagttatggggcatgaggtggactcatcagaagagcttcggctcagtattgaggaaaatgtcgccctagacatagggctactctgctctcaactaagaaagtgtagaagcaaactgagaaaagttaagacagtttccaagtaactttactgaatccaaaaataaaagacgaaaatagagaagaaaatgcaaaagaattataaactcaacaaagaaaacttcacaatgattggcattcaatcaacatttcctgcaaggaaaaaagaaaatatatgctctaacacagagaaaaatgaatcaatccaaagtggcaataaaattgtatacgtgatagatagaccttgtatgcaaaaattttggagcaattcttataactcttctccttgctcatgaggatagaggattgattgaaggtgttaagtgaagaaatggaaggcatgaagaaaaatccaagtttaacttttagaaatggtctctaaatatctgcattgaaaaaatgcactgaatgagaatgattgcaggttaggtgctgtgaaagaatagttgagtgaacttgaagacatggcaatggaagctattcaagatgaagtacaaaaaaagtgaagagagcaccagtgaatttcaggacatcttcaagctgacttacttggtataattaaaggcatgaaaggagataacattggtgaggggagaggaaaggtagaaaagccgtttaaaggaatcatggccaaaatttcccaaatttgttgaaagctagaaacctacaactccaaaaatcttaacaagttacacacacacacacacacgcaagtaatacaacaccaatactcatcataatgatattgctaaaaaactatgataaagacatacttttaaaagtagccatagagtaaagacatggtaggtacaggcgaacaacataagaagaagaacagatttcgttttctttgtaaaattttcttcaacatctgggggaacatagtagatatatgtatttgtggaatacatgagatattttgatacaggcatgcaatgtgaaacagtaacatcatggagaattgggtatccatcccctcaagcatttatcctttgtgttacaaactactcaattacagtattttaggtattttaaattgtacaattaagttgttatcgatgtgctatcaaatagtattgacataactctgatgcgctatcaaatagtaggtcttattcattctttctattttatttacccattaagcatccacaaataagagcagatttcttcttagaagtcatgcgagcaggaagctcgcatgtggagctatatttataaaatattaaaagaaaaaacttactacccaaacccatctccagaccatgaatttctctctggatatcttattaaaatattgtctcctatcaaatctctatcaaaataccaatgacattcacagaagcagaaaaaaaattctgtaactggtatggaaccacaaaagcccctgaatagccaagcaataccaaacaaaaaaccccaagatgaatatatcacattatctgaatcaaaatatactacaaattatggtaaccaaaacaggatcaatggtattggcataaaatcagacattgagactaataaaattgtatagaacacaccaaaataaattcatgtatttacatccaactgattttcagcataaattccaagaacatacattgagaaaaggacgcacttttcaataaatggtgctgagaaagtggatacccgtatacagaagaatggaactagacccttgtctctctccgtatacaacaatcaactcaaaatctattaaaaaccccaagtataagacccaaaactataaaacaactaggagggaacgtagaggacatagggaaagttcttcaggacattggtctagacaaaaattccatagctaagacttcaaaaacacaggcaacaacaaaaactagacatatgggacttcattaaactaaaaatcttctgaaaagcaaaggaaacaatcaacagagtgaagacaacttgtagaatgagagaaaatatttgcaaacaattcaactcaaaaggacctaagatccagtataagaaaataagacaaggagctgaaataactcatcagaatagaaaaccagtaatagcattaaaaagtgtacaaatgatatgaatagacttttcacagtcaaagacatacaaaaggccaataggttaattaaaaaatgcccaatatccctaatcaccggggcatgcaaatcaaaacctccatgagatatcatctcatcccagctaggacagctatcattaagaagacaaaaaaataacaaatgctggtgacgatgtagcaaaaatagaagacaaaaccacatggtcatctcagcagtcacatcaaatgttttcatgtaaggaaacattaccatttgctgtttttctagtcttgctagagcaccataaaagataagactagtggtgccaatactgtagaaaatgttattacatgcagagaatctcactatcccataccaaactacatggattcttactgttaaatgctaaaagattacaactctgcatttccaaatgttctggtggtcagagaccacttccttgacaagtgatgagtacggtgatgtgaaaggatagttagcatttacgcaggtattgggtgaagaatagtgatatacacaggaaagctttcaaagagagaaacacatggaggttggaacacagaagagaacataatatgtctgagaaataaagaaagtccagactcactggagctgagtgagaacaagaaaaacggcatgaaccatgtatttcactctggatatctcattaaaatattgtctcctccccaacacaccaccgatgtgaattgtaaaaatgcccgttcttaaattattttttgcacatcatgacagggtcaagcatgtgaatcaagctgagtttgatgagtccaggtctgtctgatgagtccagacccaggtggcctcagaaggacttggtggaacgagggcttgttgtcaaaagtagaggaagtgagattttccattgtggcttagacaagagattcttaaatttcagtggacacacaaggcccctgaggggtctcggtaagatgtagatgcagcctcagcagttctggatgtggccccaaattctctgtgtccagcaactcccaggtgaggctgctgctgctggtcctcccaggaccacactttgaatggcttagctcttattcacccacctcactcaagccacaggtaagactcacacaaggagagcatattctagaagcacaggtcacttctcactcctccccttgtgtcttagatccttttctgttacaacaaagaagtacccaaggctgggtaatttatagagaaaataaaaggtttatttggctcacaattccaatggccacagagttcaagatatggcatctgctcttgttgaagacctcaggctgcttctagtcatggtgaaaggtgaaggggagccagtgtaggcagaggtcaatgggggagaggaagcaagagagaagaggaagatgccaggctcttttaaataaccagctctttcggaaacagtgggaattcactcaccccaagtgaggacattaatctattcatgagagatccactcccatcaccctaaaagctcccattagttcccacctccaacactggggatccaatttcaacatgagatttggaggcgacaaagatcaaagccatagcaccctgaggtttggccacgcacttgctcatctccacatttgtccctcccctcatgactggggtcctgaccactctgactcagtctccctccacttcatggacacctggcagtcggtcatcatctgttttgctgaatcaacagcagtattgggggtattcaacattccacatttgtattgtttgaaaattgcccaatcttaggtgttttgttattgctacacaaacagactaagacatttactatttaatggttacatttcattctctttttatgaaattttgttgctaacagggactttctgcttggtcagaagattaacaattgtgtctcctggttccaccagaaacagagtagagacccacacagctgaggtatggggtcatagattaaaactaagagacataagattgattctcaggctccaagtctggcaagtgagcttctttgagactccctgggatctcagcagtcagactgatcattattgctgtcccaaacatcctatgtgatatggaagtaatatcaaaaccctcctgagattcctgacttgtgtcccgacatgaagtctgttgggattcctgtcattccttcaagattgttcaaataagcagcaacaatcactctcatatgagatatgaaaagaagaattccacatgaaccaaaccctgaagcccacactgaagtctgccaagttatctgcagtccagcgcgatggagggagcattttcgtggggacttttgagagtatggagaaggcctgaggaaacgaggctcagctatgggttccagaaacaaagctctgggatgtctccccatggcctcgacctctcacgtgctacctctcctcactctttgcacagatgctgccccaggctaagcccccacaggaccctaatcctagtcctgaccctgagctcagcccaggtgatatttcaggagatgggaccctgagaatgagccctaaagtctccttatcctgcagcccctgtggtctcttagactcagctacccccagtagagttggccatgagacacctgtcccccacctgctcaggagagagtgcagcaggcaacagtgcagagagaaccagcaggagccaggccaggcgctgcattcagagcagcccccaatccaacagattctccagctctagcctggggtacagcccccaccttctgcgggctgaagtgggcttctcaggatgggcaggccatgatggggattggcagtgtgtccatgggacacagccctactgcctgcctggccctcatgccccctccctccccatcctggttaagcaccaccccaacgggcccagtttcagaactcaggacacctgggccagctcctggacttgcccccactgctctctgttctcctgagccacttagtctcttttggcctcagtgttacctgctgtgaagtgaggagccttatactgaactgaggaagctctttcttcattcaaaattaaaagacagaaaaacaacgaaagtcatgcgaattaaagcctgatgaggggatgtcacttaatgggcttcaatgggcttcagacaaaacttcttgtctttcctctgcagggattccaagaaagggactcaaaaagagcttgctttctgtatggtgggaagagcagtccccagctgagaataagcaggagagtcccagtttaatcaggaagacagactagggtagtgtagaaatcctctcagcacaaactctgagaagtatggaatgaaataaagacaaacaagaaattaatggtgccgacggtggtgatgttagctcacagctaagctgcagaaccagaaacatgcggtgatgggctgagtctcctccaccagctgggggcagcagagctgcagccaggagctttcaggagagaggctggggctgcccagctggggcaaagagaaggccagcctggggttcaacaggtgtccaagaatctgtcttcagactgaaagtgagtgcagttcatcctatcccctcaggcttcagtgaccacgctctgagggtcagacacacggtgtcaccccaggacactgacagaagcctggcacagtgaaggcctcaccagggaaatgcagctggaggaggctgggcccagatgtgagcttgggcagcttcctcaggaaggggaatccctgggaggcgtcccaaggtcgaggtgctctaggagggggtatagtgtgaggtgatggggctcccagggcccgggttcttcacccaggatggcggcctgagcctcctgccactctcagggtgtcatccctcctggtccagcagtgtcctggggagctgagccctctgtcctgggcacttccagatacacccgacccctcctccctctgcctttccttccagctccaggcggactctgactcagggggcagctcctgtactcaggggagtctcgggtgggtgtggtggggcatttgggaccctggccctggatgggcatccccagcctccttcaggagacactcttcagagggacagggcttctcacctgcctcaggccacagctctgaccatggtgctgtccacgctcagtgacaggacactgagcaggggcctggctggagtaaccagggaccacccaatctctggagctcacatgctgtgcagagaccatgaccctgggacccttacagagaccatggacctaacgttagattctcagtccagtgtggttttctgctgctttttgcaagtttacataaaatattgatgagaaaaacatgaataaataacagacaagttgacggtgctgattgctaatctcttgtggcaatgaggggtgatgtagcaggagcagcaccacgactgaaatgagaccagatgccatgttgactccacaggggtgtgtggttgcttaaatgacccaaatattcccactgaataatcagcaagtgtcctaatgacacagcacagcatttagatgaaatgaacaagaggggactgagtctgagggaccaggaggaggaagatcatgggtccctgggccacctgctgctgagtcaggtgtcatcatgatctctccacagagcccagctcagccccatggccaacctcctggaaggtccacagctctgctgagcctggcccaggacagaccccaggtcagcgaggtttgggacagtggtcatgaggttaattcccacaaaggtctatgatcacagggcttgaaggctgcagctgattttctaaccagagaccctgcttgttcctcctgttgcctgtgctgccctcacagctggtttgagagacatctctccaggaagagccacagaggatgtaaatttgcataaacgcttaacactgactgcccccgaaagcctgagagggaataagagaggcctgcggagcccaactgttctgtgggtccaggaggcacagctctgggaatctcaccatggcctggatccctctcctgctccccctcctcactctctgcacaggtgctgaccccaggcccttccccaggctcagtccccacagattccaagttgagcctgacctgaatcctgagcaaagcccagacacagcctctgggtgggactcctggaaatgggtcctttgtcttcaagccccctctcttgttcttccttgcaggctctgaggcctcctatgagctgacacagccaccctcggtgtcagtgtccctaggacagatggccaggatcacctgctctggagaagcattgccaaaaaaatatgcttattggtaccagcagaagccaggccagttccctgtgctggtgatatataaagacagcgagaggccctcagggatccctgagcgattctctggctccagctcagggacaatagtcacattgaccatcagtggagtccaggcagaagacgaggctgactattactgtctatcagcagacagcagtggtacttatcccacagtgacacaaggagacagggaagtgaaacataaacccctccccctctatttcatccccttccttctgccccaggaggactgtggacaaagccatgagcaggcttggccaaattcacccaaatttgaacccccaggctgcccttccctccagccctccaggcaggcgctgcaaaggagtcagtctgcagtggatttgtgcctggcaggcctggcagtcctgtgtttctttgcctggggtttgagttgttgatggagggtctgactggaaagacagacacagggagacatccatgcaggcatgtccagagggatgtggggaactctcaggtctcagttcagtgcagtcattgttgtatcctctgggaaagcattcctccagtgcacctaagacctctagacccacagagcctgaggtcgggatgagagaatgtcaaatttttgctgatggatcactaaaggcatttttgagtggagccactacaatttactccttgattctggactcgtggatcctgactgtgggagaaacagcaccatctattgggcactgatgcacagcacatgccccatcctggaagacattgcccaaccctacacatacttgccacttgcctggtgcagtaatggagtctccatgcagtcattaaaccattcatataagccacatgtctcagaatgttggggacaagagtaagaatcttgaatgccaggagaaaaggcccatagccctttatttgcggtgaaacgagttccttggtcagaacctcctgtggaataccatcgtgatgggtgcatcattctgtaatccagagataacagttttggcagaagcattgctgtcaatgaaagcaaatcctctgtacatgccaatgctagtaaggaaaaagagctgtctctcccatgatggaagagctctaatgaaattaatatcaagcaggcccctggctgttttccacagagaaggtcatcctatagggatgcctgtgttggtctctgctgttgacagattgtcacccagcagtggcttcagccaggccagctccagttagtggaaattcacattgatgagcccattatcagcctctatccctgccaccatggccacatttttttggagtctgttggacaatgacaggagtggttgacggaggctgcctggtgtccatagaacaggtcaccctactcacctgattagcaaaatcacttcattttcacagaagacttagtgagtatttatatatggaaaaaaattctcatgctttttgcccactggaggaggtctactcacacatctctccccctgacatatttgtgatcagtattcctgttgtatctctcccaagttcctgaacatccttgaccatattccaggaccctgagtcacagcccatgaattaggaacctctgcccatctctttgcaggtgacatgagccaattacactgcttaaaattctgctttaaggagaatgttcttccaccactgctgttcagggattctcagaggccaggtggagtactagcaccgttcacaccagtggtggatgcatgtcctgcagaaacatctgtaaccccagcctaattgcctcctactaggcagctgatctcagggagccactctggaggccaaggctgtagggtgagaggaaggcatggtgcagggcttgggtcatgtctgtttggccaactcttcacgcaacttacttggccctcgtaacctaatccctcaagtcacaaatacatccctgccgtgtgattggggagctgcctaaaatggccacccgggactgtgtttcagacgaaatccagcatatcagcaacttgagtctcgtggtgagctctgtggccacaatcacacagagcctctgccaaggctcaggagccctcgcagtctttctcaaatggtgttttctgctcattcaaaacaaaataagtaggggggggggctgctcacgtgcttccagtctgggacactaggaccacctaaaccacacccacgatcttgtctgattattttgattccttgttggctcagttatgcattatggcaaccaaaccacagtgtcattggccataaaatgccaatccttggtccccacctaccctgggatcccctcaaccacatcttgctacccagttaaggtttcagcaacactgagaaaaatgtatttttatattgagagaggaaacattctttcaattgtgaaaaatttataaggcaggaatgtgaaaatattttaaaagacattttacaaagggtgaaagaccctccattaaaccactcaatatatgacactgtaattggcctcccaaaccctgacttcagctctgggttgggaccttctgtaaaggggcctttcatcctcaagccctcctctcctctcctctcctctcctctcctctcctctcctctcctctcctctcctctgctctcctctcctctcagcctgtgcctcctacatacagagacagctgctctcagtcttggtggccctgagactgacaaccatgatcacatgctctggagataaactcaggataaacatacacttaggaaccagcagatgccaggccaggcctcggtgcttgtaatctggtataacagcaagtgaccctcagggacctctgcccaattcttaggctccaaatcaaggaacatggccaccatgaccattagtggggcccaggcccgcgacaaggctgactattactatactgcagataataacagtgggagcagctggcagggactcatagtaacacagagagatagggactagccacagtactgtcccacctcggcctgcctctcattctcacctgccctctgagcagctataggtcaggcctcagggtcaggtgtcctctctggtcttaacctggcccctgaggggctggaggttctgagcagcttctccatcctctcagggcctgcatgtgtccaatgagaagtggacagggtgaaggtggtcagagctgccaggacctttgtcaggtttgtggtgtacatgaacagtttaggaatccacacaaaagcacatggtcccagttgtaatcatacgtcatgcaggggaggagagagctgtcgcagagggcacagtcctgcagaatttctcctttccttgggtaaaaccagctcagtggaagccccaggggctgtgtctcctctggtttccagatgagttgacccccacattctaataggttgcctgatgcctgacaaggactggagacccagccccttttggcctcagggccctttctgtactgatatttctcagaaactgaagaggaagcacagacactacctttggtcccacctgggaactgtgtttggggcacactgacctcccatggcccccaaagtcccatcaccttccccaggtaggtcagtcctgactggatgtgcccccagcgccctgatagtttggagtttatctttgggctctgggctgctttctgaggagctcactaagaaacccttgatgccaggcccaggacctgcgcctctgctgcatgtcccagggctgcaggtgtgaagggagggtcctgctgggtgagggtgatgcccttttccaggagagatgtctgattccagtctctagggccacatttattgggctttcttttctcactaggatgtctcagtctttttatttccttctttaaaagtacaactggtttagggtgacctgctcgggtccccttccacattgtagaagctttgttatttcactcttcacaaaaaatctcgctgctgctcactctttgggtccatgccaccttaaaaaaaaagtacaactggtttaatcatgaaatcatgtgtacacactgaagtttacagattattgccatcagcatatatatatatatatatatatatatatatatatatatactgtttctggttgggacaactgtggacaaggccatactggggtctctgtctctctcgttatcacaagtgaggatactaacagctctcttttatgcagactgtggtcatgtttcccagttgcacacgaatgtctcttatggttgtttagtttccttaccagccaagacccttaagttttcatgcagacaattggatgttatttctctctgacccaacatttttcaaacagtattccttggaacccaacaaaagttccacaagaaaagctcaagtctctggtgcacagttggaccaggttcattgtgtgcagtaggaccttgctcaagtgatgggtccatttgatattttcactatcaaggggaagggtgttacgacttttgggcactgagttgatagagggaagatagcagctgatgatggccctacccaccaatgtgtgtgtgggcagtacctattgatggatttagaagttgagggaactgtttattctgcagatggaatttccagtactgaatctccagcacccagccactagcattcagcaggtgctctgtaagaagaccttcactgccaatcacagccattacacaggtgaaggagaggatgacttttaacagccactgactcacagtaaactgaggtagaaattcagcttcacaaagtgactttgagggaacagactgaggaagcaggttaattattcgctgaaggctttgcccagagcaggaacaatacagggttgatgaggacgtagggatgccctggtgtggaaggaacaaggcctgaaccaggagcaggaagaagcatgggaaagaccacgctgccacatgtgatgagtcagcacatggaaggcacagcaaatgttgcgcaaaggtttttgtgtaataacctggcaaacagctgcttctctatccagattcatgagccaaaaaatgttactgatgcattgctgtcacatgttaaaatgctgggaagcatggtgacattcaaggaaacctgttctctgcaaacacctacccaccggcacaggagacaccccagctatgccaagggctttgtcttcctctggagtaagagcctgggaacaatcaggtggcccctgaaaggggtgccgcgtcttctgctctgcatggctgagttaattggggaactcccagagaacattccagaaaacagtcaacctgtctgtgctgggtgcattgagcatgacccaggatcaatggaagagacagaagcttaatttccttatggctgcaaggtgagcactgggaggacggctgaggcaggttagccaccgcccctgagtggcttcagccccaggcaaacagggacaggtgaagggcctatctgagcgcacctgtatctaaccagtcccagcatcagcaactgcatcctgtggaccacgagggggtgtgtgtgcccagcccctcacagatcacctgagcataaacaggaaattctccaccttacacccgactgcacaacacatctgcctccagctcttcatttacaaggtgatatcacatcagacagggactgatctgggtcccagatccctcaggtttccgctatcctttccagtccccacacagagcagactcttcactgcagggtgttgagccagctcttcccctcacaatgcctgttacaggtttacaagttactgttctccaatatgattggggtttgtttcactgtttctctatatatatatatttgcattttcttgggtaagctgagccccttgtacctggtcttgagtcaggcaggggccacacagagaagaggacttcctcccctggcaccagccgtccacagatcagggcatcaaggacctgagcagcaggttctgaatccacacctagaccccggaagtccctgagctcccagccgacagtgtggagcagccaccagggggaagcagagaatcaactggcaaagcgacctggggatggggcaggcctgggtgatagggagatgctgacatgcagtaagagccagtgaccaccacctcagatttagagggaaagggtctttattgtcctagagtattgtccttgacactgatgtaaaaattctagaatcacattttgtcttcagctcttttgcatgctgactctttgtctgacacagatccaggcacttgacttctcacaacgccccctcctccacacccagttgtgctaaaactgcatccccctcatgtgcagtgtcctctctgaggtcacaggtatccccctactcccatttgatctgggaacccctgtcctgcagacatagtggctggcttctaacttcctagctgcccctccacatccaccgtccctggtctttcccgactctctcctggggaagctgccaaatcacagctcttgatttcctggtgagtcacaaaatagttgctcattaacctttagttgacttaagttcttatccattgatacattttccccagcaactggagacatcatatttataataaacattcacttctggggatcttggagtttgcagccccctctcattctctcatggagcaaacatttccttcacctcctcatctgtccctggtcctgacagcatcctggagatactgaggcacagcagcaatgacctacctagaagctcacagccaaggcagaaacttccagcatctcatggatcttccaacactctgtgcgcacttggcaaataaggaatttcattgacctctatcactcagaggttgtgggctgtggtgggacccgcacctgtccaaggtgtgcattatcacctgtacagtggagacgaagagggaacttgcattgggttctggaaagtactgtctaaaaatagatttagacctacaccagaaatgtcctctctaacataaaatatttatgataggacacattagaggcctagaccaaaatgaaatacctccctccagagccaagatagaatggaggaggggactggggaccccagataattccacagttaccagcatgactctatggtcacctcccagaccaggtcaaaacccatcccataggagggacttcatattcctttgtaaatacagacaaagtcacctctgagctctgctgtgaccaagggagcccaggagtgaggctgagcacagtgtgatgtggggatgtgtgcagagaatatggaatcaattcataaaggagatcctgtgggcaaagggtgggagggcaaggtcacccctaacctctttgggtcccttggggctgtgcccttctcgaaatcacaaggctcctccagcagcagcccctgactctgctgattggcatcatggacccttctctccaacaaggggttgagagacctgggaggagcctgcccagcctcagacttgagaagcagcattggaggcacttcagccatggcctggcccctcttttccttggtctcctgactcactgcacaggtgctgcccccagggtctcacccacctgcccagccccaggcctccaggttcagcctggccgtcagtctgagctcagcagggccctgtgtgtggtgggcaggatgctcgtgaccctgctgcagggggaggggctggttggggtgaaatgcccccactctgtgctcctgtgctcataggtgccctgagagctcttttattcctggggctcactccagccctggcaagtagccagatatccttgggttgagaccctcagtttcaagttttttctgtccccttttctttccttgtaggctctgtcacctatgagctgacacagtcaccctcagcgtcagtggccccaggacagatgaccaggatcacctgtggggaaagcagtattggaagtaaaagtgctcaatggtaccagcagaagccagccaggcccgtgtgtgggtcatctatggggatagcgggcggccttcagggatctctgagagattctctggctccaacttggggaacgtggccaccctgaccatcaacaggacccagggtggggacaaggctattactgtaagatgtgggacattagcactcctcatcccacagtgacacagggagatgaaggagcaaaacacaaaaacctcttccattggtgtcactcttgtcctccagcccaggaagacagtggacaaagccatgagtgtgtgttgcccagttaacctggatgtgagacccccaggctgccctttccacaggccctccaggcaggctctgcagagggggcatcaagagtgaatttagggctgagatgaccaggatatattgaggtgtggaggaatcagttgtgatttggggaagtggggcctggttggaagatcagaccaaggtcgacatgcttagttgggctctggatttccatagggggtgaaggctagtccttgggctgaatatcctgagtcagtttccagaactgcccagctcacgttcccgtggcatcctgccattctcttcaggaaaaccagtggagtggacactgtgggatccacccatattccctcttctgagctcacccacccagcactgctggtagctctggcagctcagagctgtgccctcactgagaagggctgtcagcagagaaaactgtctcctccaggtttatgccccttcttagcaaggtgtggtttcataactgcctgaggtgaagctctcaagactccctttcaatatgggagaaacagaaaatcctcccagcttcacagctccttattgggatggtagaagactcaatgtgggtcagagtgtccttgtgcccggtgttgcctccctcacttagtttcacacctactgtgaaagcaaagctccatctcagagtctgcttccaggcatcccaaaataacataaccagtcatcccgaacgtgagccatcaggaacctcaggaggccacagtataccagaaagcaccagtttattcctaatgatcattgtgagtttgcaaatgcccaatgagatctgagtgtttcttgcatttgtatggaatgaaaagggccctggcatgccaggcactgtggggtctgagggagagttggagtcagatctccctgcagggaaacctggggcaggaggagcagcctcatcccatgcagggaccacagatgcacctgcagggtgagctgcaggatggacactgcccacctccaccctccacattctgtgcaaaaaatcattctttccacccctccttcagcctatcaaagttgacacttaaaaagccaccacagcccacccttgtcaacaggaaacccattcacatctccatcagccacacaatctccacataaagattcttcaaaaaataataacacttgccatgcaaagtatatatataagatgtctcaaataattgtacttagattgcatatgaaagtgatactattttgatatgctaggtaaataaagtaaattatttaactcatttacttcttccctttgtatttttaatgcgatgactagacattcagatttccatgaggctcacatcatattgtgaatgaacagtgctggtctgcaccccttcaggttacagtggctgaggagtgacctggtgcaggaagccccatctccatccataggacattggtgtgaacccagggagaggcgctggtgtaagagagatgagaacacaggtgtgaaccacctgcttgtgcaggggactgagccttcactttgagccaaacaagcttcttttcctatcttcaatcctgagcaagaggactttccggacttctttttgttttcaggtttgtgcccctccaggcctgaggctgtctggatcccagccaggggacacagaggaaatccagaagtctcacaccgaccctgttgtatttcatctgctggggccatcccaaactgctgcgtaccatttcctttcctggtgctcaaatagctgctctatgcacttgtcatggtttcagagatgactctaggtgggaagacaggataatgtatgttattatatttaaaaggaacttaaattcattaatatttattttaatatgaatcattaaaaaaatttgtcataggcaatggggaaggaggaaaagatattaaaattattttgaggaaaaaaccaaaattgtatttctcgaatgtctgagtgtcttcagtgtctcagggttgacagcggtcagctttaggttgtcctgaggatgtactccattgggggaaagcaagaaagcatgaaacacacatctctgtgacctgacacataaatcacagtaaaatggaagtaaatcttttaataaatcaaacactcacaataaatatcactctggtgaacacagaaatgcctgttaacaaactttccctttcccctgctggctcatatccccatggatcacctgtgtgcagagtggactctgtggtccccatttctcaggctgagaaccagaggctgggaaggacaagtcacctgcttgtgagtggcaggggaaggattgggagcagtggactcggtctcaggactgcggccctcaggaccaatgccacctagcagaggtttccacggggcgggctgccccatttcctgacagtagggacaacctggaggtgggtgccaagcagagggcactgcagggtgtgcccaggcctggagggtcacagagacacaggcaccacacagcagagacactgagggccagaagatcactcaggtaagggacttcagcagatctttctcctgagcaaatcaggtacaaaaaaattaagatcctgccatcagaatagataaacaaggactttaatctcagctgagctccactatccaaggaagcagaagcctctgagcccaggcccaggtgagggtggggtgaagggaggagctcaaggtggagatttgcatgcaggccccaccctcctctttggcagaggagataagacagggctgggggcaggcccagtgctggggtctcaggaggcagcgctctcaggacatctccaccatggcctgggctctgctgctcctcaccctcctcactcagggcacaggtgacgcctccagggaaggggcttcagggacctctgggctgatccttggtctcctgctcctcaggctcaccggggcccagcactgactcactggcatgtgtttctccctctttccagggtcctgggcccagtctgccctgactcagcctgcctccgtgtctgggtctcctggacagtcgatcaccatctcctgcactggaaccagcagtgacgttggtggttataactatgtctcctggtaccaacagcacccaggcaaagcccccaaactcatgatttatgaggtcagtaatcggccctcaggggtttctaatcgcttctctggctccaagtctggcaacacggcctccctgaccatctctgggctccaggctgaggacgaggctgattattactgcagctcatatacaagcagcagcactctccacagtggtccaagttcctggggaactgagaccaaaacctgccctgggctctcaggccccctccttgctctgaagatgcttcctcacccagtgcaagcggcttcctgcagtgcggccttgagaattcttctctctcagctccttccctttccaccatgaattccaaaaggaaacccgctctgtggtttctcatccaggacagggacagcttcctgatgcttgtgtgccgtggtccctgaatgtgcaactcttgttagctcttcaaatgcagggacagtgacaaggagcttcctgattgatgcagtcactgcttttttcagggatgtcttcaccctacatgcatcaccatctcccacactgtgggtagaattttagcaactacattctgatggttatcgccacaactttgatcttaaataacaatgcagcgaacatccctgtgcagcctcctttgagttcctgtgtgaatatgaccacaggattcatttctaaaagtgaaattgagggtcagaaagatgtgtgtgtgtaattttcacccgttgttgtcagattcccctccagagggattctaccaattttcaatgccagccggaagtacttgttcagagtacattgttgaaagtggaagtttttgccaacctgtcagactcaaaaatgatacctgttatggttttatttttgagtctcctgttctgcttaagtttgggccttttcagaaatagttcagtactttttcttttttaggatttgggaaactttttcttaaatatccagataagaagaattttaatcttcgtggccggacaccgtggctcacgcctgtaatcccaagtgtgttggaagggtaggatgggtcaattgcttgctcccaggagttgagattagtccgggccacacagtgaactctcatctctattaaattaaagaacataaaaataaattttaaaaggaagtattttagtctttgtggctcaagaatcaactttggggatattccataggtatgtatagcatcatttacaatgtaaccatttaaaatgataaaagccactgtcagctctaggccatacaaaaacaggtgtcaggccagggatggccacaggatgtggttgaacagtccctggtttgtagggttatctgagggttgaaaattccaccagaatatgatctaggtgggaatctctctgtgagggtcactgtatttcacctcctgtattagcctgaggtctttcattggataagaacatgctcacatcatctatttgattgtatcatgggtttaagacaaccccgtgtcacaatcacataacatttatctgcattgcttgctccgagttttgggagagctttaatttatcaggaatagactcctcctaaggcaaaagtctgagagagagggatgggcatgtgggcaagatagtttgtaccaaagctggaatatccagggcaggctcagagagaaggttactaatatcagcatttgactgcagccaaaaacagaagagaacatggaggttctgagaatgacaaataaacaaatagtttaagttttaaatgtattgaatgtttttataatccatgaaaattctagaacagaatttaacaatgggataaggaagagagcttgagatgttaaaactataaagaccccaagccaagctgccaggaaaagaacaggatctttttggtggaaatatgtttctgctgcaaattattattttatgtgtgtgtgtgtgtgtgtgtgtgtgtgtgtgtgtgtgtgtgtgtgtgtgtaaggaaacctcccatggaacatccttcttccctacagtcaagatcaccctcaccctacaagggaacctaaacaaaatgtcaatatcaaatagaaaaaaataatgcactttgtataaccattagagagtctctatttgcacatcaaaatgtggatgcttaacgttaacattggaaatagtattttaatatgcatatgagatgaattttctttagactatttttgtgaattatctttcttaataaggacatactcttctcttagaacaatttaacttgtgatattttttctattttctgtatcagttctgttttttctaaacactggcaaagatatcctatggctactgattaataaattagattaatgtgtatttaacttaggtaagttagttcaagagtggacagatgtgatttccccacatatcctatggctactgattaataaattcaattaatgggtatttaacttaggtaagttagttcaagagtggacagatgtgatttccccacatatcctatggctactgattaataaattcaattaatgggtatttaacttaggtaagttagttcaagagtggacagatgtgatttctccacatatacctcacagatgttgctggtgcttactcactcttctcttctaatcttagcaaataaagtgggaaatttgacattcctaaacacccagatgacaacaggagagaggaggtgaagccccaaagctgttattctttaaatcctcaggatgaatcaccctggagaatcacccacacttcagttggatgatacgcaaatgagagtttggtcttagagtggtgctgagttagttcaggatttgggtcactgggatggggtgaatgtgttttacaagtgaaaaatacatgagttttggggtctgcagggtagagagttcttggctgaattgtgtcccccagatctgggttgagtgacatcccaccaagaggagtccaggagaagtaaatttgtgtaaacaccaaacatgcactgccccactaggcctgagaggaaataagcgaggcctgggaagcccacctgtgctttgggttcaggaggcagagctctgggtgtcttaccatggcctggaccccctctctgcctctccttcctcaccctctacaaaggtgatgcccccaaccctgccttaggctcagcccttacaggatcctgagctggtcctgccctgaaccctgagctcagcctaggcatagcctcagggtgacaccactggaaatgtgtttgttatcttcaagccccctctcctttcctctcctgcaggctctgtggcctcctatgagctgacacagccacccgcggtgtcagtgtccccaggacagacagccaggatcagctgctctggagatgtactgagggataattatgctgactggtacccgcaaaagccaggccaggcccctgtgctggtgatatataaagatggtgagcggccctctggaatccctgagcgattctctgggtccacctcagggaacacaaccgccctgaccattagcagggtcctgaccaaaggcggggctgactattactgtttttctggtgattagaacaatctcacagtgacacaggcagatggggaagtgagacacaaatccatttttcatctgtctcatcttttcctccagcaccaggatgactgtgggccaagccatgagcaggtctggccaagttctactggatatgagacctccaggccatccttttgttcagccctacaggttggtgctgcagagggtagagcaggagtggatttagggctgctataatcagaattttcttgtgttttcaggcccctgaagtgacttggggaaataagaacgggatggaagatgagagagatgtagagaacaatcacttggccttagatttccatacgatggtgattgggtcactccttccaaatatcttacatcagtccccaaaaatgcccagctcagctcaacacctgagcttccaggcttccatggcagcctgggattttgaacaggaaaagcagaggaacaggaaaagcactgtggcatctgcctagatatgcttttctgagctcacccaccctcaactgctgggagcttctagaagcttagagctgtgccctcacaggaaagtgctattgtttccagaaaacttcctttctcatatttaggctcagttttgagagttttggtttgatgactgcctgagccaagaacccaaggccccgccttaatacaggatgacactgaaaggccttccagctccagacctcccattgtggatgcctgaggcctcagttgcaatcttatgatgggtcagggtctccttctggtgggtgatgcttctctcactcctttcagattctctgtgcatgaaaatgtttatctcaaagtctactttcagggaacccaaactaagacggccagctgtcaccaaaatgagccaccatagacctgaggtggccactataccctggaatgcatcagcgaatttcctaaatttccactgtgagcatccaaatgcccaacgatttctgagagatccttgtattcttataaaatgaaaagggatcctgaaatgccaggtgctctgagtcctgaaggagaggtggaggcagatcttcctgcaaggattccacggaaaagggagcagcctcactccatgcagggaccagagatgctcccacgggggcagctgtaggatggatgctgcccacctccatcctgcacatcctgcacaaacaatcactctttcacccctccttcagcttatcaaagttgacacttacgaagccagcacagctcatccttgtcagactccttcaaacctccatcaaccacacaatctcaacataaagaatctccccaaaataataatagtaacaaaataataataataataaaataatagtaacaaaatagtaatagtaatagtaatagattttcaggcacagaaatagtaatatagtagctatgaaaacttctataaaaatctcataaataattttagattgtgtgcatgtgtaaatattatttttcacactttgtgttaaataaagtatattattgaacctagtttacctttttattttttatgtctactatggtgactagacaataggattcacatgagactcacatcatgttgtgattgtacaatgctgatctggtcttaccccttcacatgacaggtgctttggagtaacctgcttcagcaagccccatctccacccataggacatatgtgtgaagccacggagaggcactggtggaagagaaataagaatatgggtgtggaccagctgtttatgcaggtgactgagtgctggagccctgaccctgctctaacctagatgtgtcacatccatctcaccagagaccactcctggcctgcctgagctcacaactggggggaaatcgcatttctggcaacatggtcacttgatgtccagtgttatcctgtctctcccagggcccagtaagacaaaagaagctgtttttagaaaggggagtaacactctactgcacatgacatggccttcttccaaaaacccaggagtctacattgggattctccaacggggtttgccatgtgcaggaggttttatttcccatggtggagtctgctggattctctggccccaacagcaggacactcacaaccctgcctgcacctgctgcagagccttcctgctctgggcctggaaaacaatgggtgacatttatggctcctgatacatggattggagtcacatccccagtagtaaaatatgctactcctagatcttataggccttgtgtctctttcttcctggggaaaattgaaggttataataacatcttttttttttttttttttttttaagatggagtctcgctctgtagcccaggctggagtgcagtggcccgatcttggctcactgcaagctccacctcccagattcacaccgttctcctgcctcagcctccctagtagctgggactacaggcacgcgccaccgcacccggctaatttttttgtatttttttattttagtagagatgagttttcaccgtgttagccaggatggtctcaatctcctgacctcgtgatctgcccgcttcggcctcccaaagtgctgggattacaggtgtgagccaccgcgctcggccataacgtgttgtttattttgtaggagactctcagctgctccagacaactaaagtcccaatttcagctaatatggaggaggaaacatctttgtttatttcccactctcaaaagtgcatggatctcacaaaagcttccaataggccgtgcccatcatgtacatgtgattgaactatgatatccagatggtctgagcccccatgatgatatcatgatagggaagggagagctaatgaagctgggcagaaaaagtgtgaatgtatactgttgtccattccacgtgaatgcacactgattctgatcctattctctgaggacaatagacaagacctcagtatctgcttcagtggtttaactgtgcacctgcagccatagcattctgttccaggagatccccatctggcacagatattgctaatgccactattgcccatctgggtctgtacaaatccaaattcatcttccaggatcattcaactattgtagagatcagtccagtaaactgaaagtgaggaccccagaagtaatcacacgtactgcaggagaggagagagctgtttcagaggccacaatcctgttgaaattcctctgctccttgggaagaaacagcccagaaaaggccccaggggctgcgtctcatctgggttcctggatgaggcacaccccctactgcactgagattccacagaagctgggggtgaagtgcaaacaccgtctttggttcatccttgggattttctttttatcacacactcgtcattttgtccacaatgtccaaagtttctaaagtgctgtctaatagatagaggttctttgtgcgctgaactaaaagctcttgggttggctaatggtgatgtttgcacatttttactgtacttactgccgcttaattacacacttaaaaatgattaaaaggatgaaacattttgttatgtttattttaccataataaaaatattgcatgctcaggaagcaaagtaatactagtttaattttgaaatcacacaactggtaaaaatggaaagaaaagcaccattttctctgttctatatgctacaactcaactttctctctctctctctttctctaattaacaatgatatcctgtctggtccaaggtcacacatttccagtgttgcaggaatgtctgttgaatctgctaatttgttgccaggaagaatactcaaacttctcatgctcatatttgattgtcaactgtctccagccaacatttctaaaccaggatcctttgacaagacttgtgaagaattttgtaaaaagtaccccccaagatgacagtgttcgctgttggcagcaggactgtttccacgcagtagggctatgctgggtgtgcagtggagctgtgcacactgtgctcacggggcagattctgtgctgctgactctgatccctgtgcttgggaggaccgtgtccactgctgagtctacatctgaatttgattctcaagaaaaaggtcattcatagctgctggacactgagtcacacagagagacagaaggtggctgaggacaccttatctctgatgagaataaggggattagatctgctggtggaacaggaagctgaagaaacttctggctctaaacatggaatttccagccctctgtctctgctgtccatgcccttctcatctgtatgttcctgggagatgtggaccacgggggtcagaggtgaaggggattgggaagctttcatgttctctctcaccatctcccttgtttatctaacacactcttacacacctactttattagagcttctgctctacaaacatggctgagctctaaattagagacttttgaaagtgcagacggatgcaggaactcgtccatctggagactttccaccacttgaagcagtgaacacatctctgcaaggctccaaatttcaagtgacaggattttgggatttcaaagaaaactaaatctttggtgaaccacgacagaagagggaaggttcacacatttccctgctgcttgggcctcagtgaggactgactcagccagtctcaggctcctggaaacctcctaggagatgtgcactaggaaagtcttttcagtacaacctggggcaggtaagtggcccttactctgatattctgctccctgataattttgctttcagagaagaacaaagacctgtgattctgggaagttcaaagcccccagacaaggtcttctcattctcccgtgacagcctgagctctgcattcccaaaaggaggagcatcttcccggcatgaagagccaggagtagagagggagcttctcccaggggtgagcagggcagaagccaccttggtcagtgggaaggaaacgtgctcagctcacatctgacccagaatgactcagtcacacccgtgcagggtcacctgcatgtgagcatcatctatttgctccatgagaaaataccttgtgtgactcttgggtaaaatcataccgtaggtgacatttctctggctattgcttcagccaatgtttttcaaaattcactgtaggacacttacataaggtaagcatgtcaggtgtgggatgtgttgaataggaaaagcacaggcttcctgtatcaatgttcatggcttgtattcatggccataactcgtggaaatggaaaaaaaaaaaaaacagaaaagaaaatgataccctgctcaaaaaagcactgagaaataccattgtagtaatatatcttcaacttataagttgagctaattgaacattaacttagatagatcatttttatggggggattcctaaacctaaaacattgtattaaaaattttgtcaggttaaaagatcattaaaaggccaatgtttgattaaaatctggagtcttttactttgggctgcaatcagccaatgagtgcatggagttggctgccctcccagaccctgactggctccacgtcgaggtagagcagcgctcccgacaggcagctggaggaactgacgaggggaagctgtttgcatcagggcctcaaaaatttggctcaggattttcccacgtcccctccccaagcccaagctggtcccaggacactcagaagagctcatcattatgggtctaaaacttctctgatctcgctcttctttcttccttccccagagaccttggaattgtcagtccctctcacaggcccttcctttccttgtcaagtgcactccctgaattatctgctcctgggtcagcaattctctagaacttcagggaaagcagtgctgggtcacccacatggggccccagaaagctggctaaggaccagacacacaggcagcaggctaggtccccacagggctgcatggttggcatcgggtagaggggagggaccaggaaccactcgctgagtgtccgtagggccaggtgaactagggaagggctggaacctggtcaaagaattgtgtactaagcaccactttctctgttctatatgctacaactcaactttctctctctctctcttctctaattaacaatgatatcctgtctggtccaaggtcacacatttccagtgttgcaggaatgtctgttgaatctgctaatttgttgctgggaagaatactcaaatttctcatgctcatatttgattgtcaactgtctccagccagcatttctaaaccaggatcctttgacaagacttgtgaagaattttgtaaaaagtagcccccaggatgtcagtgttcactgttggcagcaggactgtttccacgcagtagggctactgcaagccacacctgtccccacacagtagcatcttcctggaggtcaagagtgattttgtttgctatgctgccccagatcacctaatttattacctgtgaatttcacacactacacatcctgcctgtccccaaattcttcacttatgggcaaatgtcacatctgacctgaactggtttacatcccagatccccttcaggcttcccactgtcctttcagatcctcacacacccaagacccttctccgcagggcacagacacagctccctgcacacgcttccatcacttgtctcttcactccttcctcaaaggaactccacagactcttcttcagggaggccttctccaatcactgaagctacagcagccagccagtcagcttctgtcagaactttcaatgattagctgcatagagcttacaattacacatttgttttttctatcgttatcttttgactgatttatttctattaatcattgcattatcagtcagaaatgctttttcactacaagaacacatgtggcaggaaccagggagcttccaattttcttccacaaaaataagtctgcacgtgcttggtggttgttttccagatgctctccagttccataggaagctcaaatatttctacctctccattccctttcaatgagatgttgactttgttttcattgttgttgatgtaagacctcagcatggctgctgcagctccagctatcacacccaagttcaagagaaaaagcaaagcacaaacccaatctagtccttccttcataagaggaaaagtttcctgagaagaatctcagccatctgactcttacatcctatggaccaacgctgggctacatggtcactgctggctagaagaaactggaaatttgcctgactttcaagtgaatagaggggatgacacacaagtagaaggtggtagggagtatctgctgggtctgtaaacccaatctgcctactgcactgatccagcaacaggacaggaaactcctcagagcaaggactgtgtcttcctcatgctgaattcctaaaatgcattcttgccaggacagagtgggtcagggtgaatatttgttgggtgaatgagcttctgtctctgttgtattgcaggagtcaccaccagtgcacattggccctgtatttgtatccagaaccaatcaaagccacccctgagtcctgcatctctcagtaccaagctccagtcccccttcaagaccacccaccacacagacgtgcagggagcctcaggagggcactgtcacctccttctccacatgtgagtgtttgtatttccatcaggaatctgagcacctcgtgcccaggtttgaggcaggaaggggccacaaacagaagagaaatttcttctctgaagtcaacagtccatgaatcaaggaatcagggacctgagcagcagattctgaagctacacctgaacccaggaggcccctgagcctccagctgacagtgtagagtggccacctgggggcagcagagagtaacctggcaaaaatccctggaaagggggtggagctgggcatcagggagatgctgacatgcagggagggtcagtgaccatgacctgagacctggagggaaagaggttcctcttttcttagaatatttgtcattgacactgatgtttaaattcttctgacctcctgtctctcagatttgactcttggaaatggtgcttatttttctgatacagattcagacaatttgcctcttctcattgccctggcccccatctcactgtcacacatgccattccattctgtagtcacgcgtgtcccacctccctgcccttttctctggtagctcgtcctgcagacacaggggcttctccttccctggccactcctccacgtccactgtccccagtctttcccaacactgtcctggggaacctgccaaatcacagctcttgatttccttatgaggcacaaaatacttgctccttaatcttttgttgacttaagtttttatccattgatatattttcccagcaagtgaagacaacttagttataataaacattcacctccagggtcttggagtttgcagccccctctcattctctcacaaagccaacatttccttcacctcctgatgtgtccctggccctgacagcaccctggggatactgaggcacagcacctatgacctggcattagaactcacagccaagtagaaacttatcacatcccatggatcttccaaaactctgtgtgcacttggcaaccaagaattgcattctcctctagcactgaggggctgtgccctggggtggggcctgtactggtgcaaggcttgtgctgtcccctgtagagtgggaagtaaaaggtccctgcattgggttctggattgtgtcttcaaaatgaatttaggcctataccaaacatctcatgtctgacataaaatatttatgaccaggacatttctagagaagcagaagaaagttaaccacctccctcctgagccaggatggaatggaggaggggactgtggaccccagataattcccccatcaccactgtgactctggtaacctcttgaacagggccaaccactatcccataggaaggactttatatcccctagaaaatacagagaaactcagctctgagtttttccatgaccaactcagcccaggggcaaaagtgggcacaatctgggtaaagatgtgaactcagaccatgggaccagtgggtggaggagaatcccatgggctgagggggtgggcaagcagtggtcaccccttttctctctctctctgtgtcccttgggactgagcccttctctggaaaccacaaagctcctccagcagcaacccctgactctgctggtttgcatcatgggctgttctctccagcaaggggataagagaggtctgggaggaacctgcctagcctgggcctcaggaagcagcatcagcagtgcctcagccatggcctggacccctctcctcctcagcctcctcgctcactgcacaggtgctctgcccagggtatcaccaacctgcccatccccagggctctgggtccagtgtggccatgactatgagctcaggagggccctgcctgtggtgggcaggatgctcatgaccctgctgcagggtgagggactggcggagctgaagtcccctcaaactctgctcagaggcttgtgagagcctgaggggctgcacctgccaggagagagtactgggttttcagttcaaaggctccatgcagagggaaagtccatgggccactggggctagggctgattgcaggggataccctgagggttcacagactctctgaagcttttccaggacagcagggcaggggatttcatacggatcttttacctaaaagccatcctctcctttttttttttttttaatctttgcaggctctgcgacctcctatgagctgactcagccacactcagtgtcagtggccacagcacagatggccaggatcacctgtgggggaaacaacattggaagtaaagctgtgcactggtaccagcaaaagccaggccaggaccctgtgctggtcatctatagcgatagcaaccggccctcagggatccctgagcgattctctggctccaacccagggaacaccgccaccctaaccatcagcaggatcgaggctggggatgaggctgactattactgtcaggtgtgggacagtagtagtgatcatcccacggtgacacaggcagatggggaagtgagacaaaaacaccctcccagcctcggtcaccctcttgctccagccccgggaggcctatggatagagccatgagtgaatctggtccagttcacctggatctgagcctcccaggccgcccttccctccagccccctccaggagtctctatagagcatacatcaggcatacacatggcctggaaggaccagaatcatctaatgacttggggctgtcgtgtgagttagagaatgagggcctgggtggaaagacagacagaagcaacctctgtcctctgtcttacccctggatggtaatggggtggggatgaggccagtccttagaccagctatctggctcagtccccagaaccaaccctgctgaggtcctggcccccaggctgtgtggcagtctgtgattcccaacagaccaaaccagaggaggggacactgtgaagtctgcccaggtcccctcttcaatgtgacccacctagcactgctgagaagcccagcagctcagagctgtgcccacaatgggaagcgctgttggttgcagaaagcttcctcaagtttatgtcctttctcagatggttttggtttaatcaaccaagatctcaagtccctgccttaatgtaagatgccactgaatgaagggcctcccagctccagagctccctgtgtggacggacacctgaggcctcagtggcaaccccattatgagtcagggtctccttctgcccactgttgcctccctcactctcttccaaatcttctgtgcatggaaatcattgcagtcaccttccagggaaccccatctaagatggccagctgtccccaacatgggctgtcagcgacccgaggagtccactatccactgaaaattctggtttctgtcctaaattttcagagtacatgttcaaatggccaatctgatggttccttgaatttttatggaatgaaaagggagcctgacatgctctaggttgagagatagttggagtcagatctccctgcagggaaacctggggcaggcagagcatcctcgccccacgcagggaccacagatgcacccacagggtgagctgcaggatggacactgcccatctccgccttccacatcttctccaaatgtcacccctttctacaaccccaacccaaatcattgatctccagaaaaataacagtaacaatagccatgaaaatctatgtaattcatctcataatttcatgttaacatgtgaaaatgatagtattttgctttattgacataaataaaatatactatttatccaattttatttgtcttatatttttatatttaatgtggtgaccagacactaggggtcacaggaggatcgtgtcatactgttatgggacagagctggtcaggactctttcaggtgacaggtgctgttgagtaacctggtgcaggaagccccatctccaccagacccaggtgtgaacccaggaagaggcgctggaacaatggagaggagaacctgcttctgcggaatacagtgcccttgagccctgcccctgctccatcctacgtgtgccacctccatctcaatgtggatcatttcttgccctgcctgaggtcatgactgaggggatctggcaggtctggctgtgtggccactgctgtctcatgtggttctggttgtaacaaagcccaggaacatagaagaggctgttttcaaaaggtaaataataatctactgcacatgacatagacttgttgctaaatcccatgggtctacagtaggattctcctgttgaggtttgccttaagcagaaggtttcagttcctttgtccagttcctctattatgatagggtctgcagtttctctggcccaatagcaggacactcacacccccgcctgcacctgctgcagagcctttctgctcttggccccaaaacaacgggtgacacagttctcagacccatgatttatggtgtcagtattcaggcctcgggggtccctgacggcttctctggctccaagtctggaaacacagcctccatgaccatctctgggttccaggctgaggatgaggctgattattactgcagctcacataggagaggtggcactttccacagtggtccaggttcatggggaattgagacccaaacctgccctgggctctcagcctctctcttgttctgaagatgcttcctcaccctgtgcaagtggcttcttgcagcaccaccttgagaatttcccctctcccagctcctctcctttctcaccaggaagtccaaaaggaaacctgctctgtgatttctcatccaggacagtgacagcttcctgttgcttgtgtgttgtggtccatgaatgtgcaactcttcctagctcttcaaatgcaggcacatagtgagaaaagctgcctgactcatgaagtcattgctgtttttaggggcgccctcaccctaaatgcatcctcatctcccacgctgtgcaggccaatctgcacagaagtcattacagggagtttcaagaaattgcaccttagtcaactctgtgtccactatgctctcgtgaagatggccctcctggctgggctattcctctgtacctctgtcctgaagcagtgaccactgtgagagctgagcatgtttttgagggattaagaaccagaggaagctgttgtttttcattattattattattattattattattattattttgagacagagtctcgctctgtcaccaggctggagtgcagtggcacaatcttggctcaccgtaacttcagcttcccaggttcaagcaattctccctgccttagactcctcagtagctgggattacaggtgcccaccaccatgcctggctaatttttgtatatttggtagaaacggggtttcgtcatgttggccaggctggtcttgaacttctgacctcaggtgatccacccgccttggcctccgaagtggtgggaatacacacgtgcgccaccacacctggctgcgtttttcttatttttgttcctcttctttgcctcaatacctcaggttgctgagctggggagattttgagtgacagactcagtattctctcaaaatccccctctctcacatcgctgaggccctgtcctggaaactctccaaaagtggatggtctccctataggatgggagcttccaaaatggctccacagggaagagttaacctgagttcattccttcctcctcattgacatccagcatttgtaatttccatggccatcaatactactatagctgaaatcttcattaatctactaaaggtgagagtgaatttcatacatattcaaacattagtttcatccaacatttaaattttatgagtcaattggtaaacatagccatgattacatgtagtttaggcttcataaactttgattaaatggattttatttaaaacaatgtaatcattttactatatgtgtatcctacctatatcaacatgttgttacttgaaatatccacaagaaactatatttcaaaaaccaaattgtatttattgtctattgttacataaaaattgctccctaatagttagcatattaagagaacacgtgtttgtgatcttgtcactttggtgcatctggaattgagagcagcttagttttgtggttctggccctgggttggtcatgaagtcgcagccaagctgtcaggccaggctgcattcagaggccagagcaggtggccaggcccagcctgaggggcttccactgtccctaacctgtttggctgattggaaaactcagcggaaaaggagagagtgaagtgtaaggtgcctgtcctggtcccccatgtcaaagaccattccatacatgcaccatttcttattctttcctgcaacatcctaggcatagagcactgcccattcattctaaggctgtagagtattccacagtagaattttagccatgcaacctctaatggttaacaccatgattttgatcttacaaataacactgcagcaagcatccttatgccgactcctttgagttattgtgtgcatatgatcataggataaattttcagaagtggaattactgggtcaaaatgatgtgcatttgtaatgtttacccattgttttcacatgtttcaccagtttacaatgccagccctaaatattgattggaattcattggtgaaagtgcaaatttttgccaacctatcagatataaaaaagttaccttgttacacttttatttttgatttctcctattgtgcttgaagttgagcatttgctcaaatgtttcagtgctcattactttttaaaattcggtaaactttttcttaaatgtataaataagaagtattttagtctttgccacacaggagtcaactttggggatactatgtaggtactgacagcaccatctgcaatgtaaacattaaaatatataaaaaccattttaacccattaaccatccccagataatagctgatttcttattagaagtaatgcaagccagagtcagtggagttatatttagaaaatattaaatgaaaaaacttactacccaaagcaatctacaaactcaatgcaattcctttcaaaataccaatgacattattcacagaaatttaaaaaaacctctaaaattggtataaaaccaagaaagatcctgaatagccaaagcaatactgagcaaaatgaacacagctaaagatgtcacactactagaattaaaatatactacaaactatagtaaccaaaacaggaaggtaggtattggcaatcagacactgagaccaatataacagaatagacaacccagaaataaacccatctatcatatagagccaatcgattttcaacaaagatgccaagaacatacactgagaaaatggcacaattttcaataaatggttctgagaaaactggatatccatgtacggaacaatgaaactagacacttatccccctccatataaaaaatcaactaaaaatggattaaagactcaaatataagacccaggctataaaactactagaaaggaacttagagaacattggggaagaacaattctttaggacattgttctagataaaagttgtatggccaagaggcaacaacaaataatagagatatgggacatcattaaactgaaaagctcctgaaaagcaaaggaaacaatcaacagagtaaagacaatgtgtagaatgagagaaaatatttgcaaactactcacctgacaaggacctaatattcagtataagaaaagttaaaaactgaaataactcatcaacaacaacaaaaaaaactaataataccattaaatagtgggccaagaatttgaatagacttttctcaatagaagacatacaaacggccaacaggcatatgagaaaaatgttcaacatcactaatcagcgagggaattaaaatcaaaaccccagtgagatacaatctcaccctagctggaatggctatgatcaaaaagacaaaaaatacaaatgctgatgaagatatgcgacttcatatttttctagtccaattctctgggaacaatgagagtgctctctttgctctccctttagtaactatttttcacatgcaaaaatatgggccctactgggaaataatgcctaagaccaccaacaccttaactgtttgttcatcacactagaaatgaaactgttttccaaataatattaacatctatctgtgtctatcaccattgtgtcaatgtttgtgtgatcctataaagtttagaaggcctagaagaatgcccttgctttttgcaatacaaaaatggcctaacagatatagatgacatagatatagatatagatatagatgatatagatatagatatagatgatatagatatagatatagatagatagggggttgtatcttggaatttgtttctctaagggacttatttcacatctaatttgaaattattctggttttaaacattatagaatgataacacaattggtgaaccaatcattctgtgttgaggttaacagtatttttttacttcaattctcactgaatgagagcagtttttatacggaggggccatgccataacaatatcacatactggggttgttctcagactgtgaggttctgcctacaccaagccaggatgagaattttatttgtcaaactgctctctccacttgtttgtatcccataatataccccaaaaatgagcataatttcattttttatgctgtttgttcttacatttaatacatgtaccaaaaagttgtctttgtttttaaaataaaattttatgctatcttttaatctatgtccctatagaaaaatcatgatccatacacatttgttatcacagaaagaacaagataaatttcctctctctctcataaatgccatgaccgctgctttttgggattatttttcttaaattattttttaaacagaaattcatataacttaccttaatcaaatttcttttcaaagtaatcacatttcttttatgtgaaaaattatttaccttcttttatcaaaaattatcttaatacaaaatatgtattgttttacttttagaagaaatggaaactatctacacattactaatctaaaaatacatgctctgggtttatatggtgttaacatgtcttccaaattttaaggaataggtatttaaatgtcatgcactttgtttttaaatttagaaaatgtttcaaccttttgcctgggcatggtggctcatgcctagaatccctgcactttgggaggccaaggtgggaagatcacctgagctcaagaccagcctgtgcaatatggcgaaaccccatctctacaaaaaatttcaaaaattggccaggcatggtggcaccacccacaatcccagctactcgagaggctaagatgggaggattgctggagccggagaagttgaggctacagaaggtaaactgttgaggctaaaacatggtaaatatttaattgttcacttaaaagaaatgttggttacattgaaaagaaatttggttaacgtaagttagataaatatctgcttaaaaaataatttaagcgagctgttagcactactgcattccagcctggtcaacagagcaaaatctgttgaaagaaagaaaaagaaggagagaagggaagggaagagggaagggaaaggggaaggggaagaggaagacagaggtggagggggaggggtggaggaggaagagggaaggggagagagagagagaaagagacaaagagagaaagaaagacaaagaaagaaggaaagaaagaaagaaagaaagaaagaaagaaagaaagaaagaaagaaagaagaaagagaaagaaaaagaaagaaggaaggaaggaaaaaaagaaggagaaaagaaagggacagaaaaaggaaggaacgacggggaaagaaagaaaaaaagaaaaaatatttcaagcttttcagtagcagagacacttcgtaatcaataagcaacagaaccaaaacaaaaaaaaaaatctacagaacagtctaaatacaattataaacttctgattcggatatcaaaaccatttcaataataaatatatggtatgaaaacctcacaaaggtcaagtagaatgtattatatttgaaagaaattacgagttgagagtaggaaatttataaatttaatcaaacaaataagcattatgaggaagttgtattgctaatgtattatttggcaagctgttcagtggaacaccaagatattcttaaggaagttgcaaatatctttttttttttttttttttttttgagacggagtctcgctctgtcgccccggctggagcccaccaccacgcccagctaattttttgtatttttagtagaaacagggtttcaccgtgttggccaggatggtctcgatctcctgacctcgtgatccacccgcctcggcctcccaaagtgctgggattacaggcgtgagccaccgtgcccggctgcaaatatcttttaagatgttgtcattgaagtggatttaaaagtgaggacatgaatacctttaaaaaatattcagggataaagagagaaaattaaatttagattgtatacatatataaaatgtattttaaaagatcagcttggctgggcgcggtggctcacgcctgtaatcccagcactttgggaggccgaggggggcgcggatcatgaggtcaggagatcgagaccatcctggccaacatggtgaaaccccgtctccactaaaaatacaaaaattagctgggcatggtggcgggcacctgtaatcccagctactggggagggtgaagcaggagaatcgcttgaacccaggaggcggaggctgcagtgagccgagatcgcaccactgcactccagcctggcaatagagtgagactctatcaaaaaataaaaaataaaaaaataagcttgtctctttttattccttaaataaaaggagcagacacttaaattccttgccttttattttaaaatttagaaaatgcttacagcttcccacagtgaaatttatacttagataatctaatcaatggataataatatcaaaacagaattctttgaccaatctattttcttcatttttaagtctaaatgtatactcaaagaaataaaactatttataattgattctgctgtttgaaaatatttactgatcatttaccttgcaccaactgacctccagctctgaagataggtcagtggtaaagtatacaaagttgcccagcttcgttaaacttaaattctaatgaggaaaaaagaagtaattaatcagggactttaaaacaggagtgttgtgatatggcttggaattctaattgcttcctgtgcttgctgtgtggagactggattgaaaaatagggcgatgataggagcttaaattcatacagaatatggctagcctgtattttgagggcccctgaaataagaatgtatagtagttctcattatttcctcaagaaatctctgcagtagagctttggccttgggagggaagtactatagtcaccaagtggtgagggtgggaaggtgaatttgcaaataccatttggaatgagttcactttaaaggtaaagctggcaggattttcatacatgtcagatctgaaaatctgtgtgtgcgtgtgtgtgtgtgtgatagagagagagaaagagagagaattagaacaagacagatacagacagacaatgacagagctgcagagacagagagaattaaatggggacaccaagaatattgagctgagaaactataaaatgggaggtgccattaaacagaatggggaagagcagttttggggagtgtcagtggctccacgtagacttattaattttgagattcctaaaccacatccaagtggagaagacagacagtattgtgtgtagtctagtgttatggtatcatataaaatatcaggaaatgaatgacacaaaaattagtaagaaagcaaagataagaaagataaaagtcccgagcctagtggttatctactgcctaaaaagtagtaggctgggcatggtggctcaggcctgtaattccagcactttgggaggccaagttgggcagatcacctggggttgggagttcaaggccagcctgaccaacatggagacacctcgtctctactaaaaatacaaaattagccaggcatggtggcgcatgcctgtaatactcaggaggctgaggcaagagaattgcttgaacccaggaggtggaggttgcagtgagtcgagatcgaatcattgctctccagcctgggcaaccagagcaaaacttggtctcaaacaaaaaaaaaaaagaaaagaaaagaaaagaaaagaaaaagaaaattagcaaagatgagaagaaaccagcaaaaagtactaggtataattatcaaaaatgtcaagaggaaagtaggttaagtgttctagaattctatcaaagaaagttttgaaaaaaaagagggagagatcaactgcattaaatgctgctaatacataaattaagcaaaggctgaggaattacgcttcaattcatcatttaacaatatggataccatttgtgctttgataagagcaattttcttggaatgagtaggtgagaaaccatattggagtggtttctcaaaggaatgcctgatctctgggttcttaaggaaactttttattgaacaggggaggcacaaattggattagttttaattccggggtccggacacactctaaacatgtgcctctgcatgcctcgctttttaaagctaggtatcctattatctttcgataacaaaataatcacctgcaaaaccaacacacatttaatggacacacttgtaaagtgtgtactagaggttgttggagaggatgtgattccacgtgatagcttacgagtcactgatgggcaggtaagctggtaaaatatctttggaaaactcaccatacctgttatacttaaatattcagataccaaacagcagaaaatccatattgtaatatatttccatgagaaaaaacaagagctctgtattaaaatattgattattattaaaaataatcccactgggtttcctgacttttttattagcaagtcagtctccgcctgttttcagtagtacaacctctatttaacaaatgttttgtatttttaatcagccacttagaaaaaatattatattttatatcaattctacgttcagtgccaaaaccagtgttttgtacattccacagaattatttgttgaataaataatgaataacttaaataagttatagtatccatatataaataatatatcatctccgaatacagtgataacatttgttatgtagaaaatgatttcaatctcagttaaaaatattttgggcataggagttactgtcatataaagattctcacattgttttgtttatatgaaaatgtttgcagttaacgtacatttttggtacctaaggcttttgctcttgctgccatagcaaacagtgtgcctattaagaacacgaacctgagttttatttcattttaacagatttcttaataaaatatatgccaccttatttggtttaatacataagcaaagagccatccactccaccattgccccttgtccctcctccaatgcagctccttaagatgttactgatagcagaggactttgtgttcaacctaagcactttatagcccttttattttcaactaggtatgaggtaaaataattcagcaccaataaaacaaacactctttaaacaatgaccctttttcttagcctgttcaacaaaacgcagcaagacagagtacacttctctttcccagcaaatcagtgttgccactacattctctacgttctgaaaacttgtattattgactttcttacaaacaccctttgagcttataatttagatgtcatcaaataatgtacaaaaacacgctacttcctcccccttctcttctcttcttaccagactattgtcagtttgcttttctatccaactcctttcttctgtctacttgatttttaaaagactttctacatatttactatcttggtattgtagagaccaactatgtggtcaaactacacatataggaagaactgaattatatgcaagcatttttaaataaacgattcctcctcagttttctgtgattatttcatataatcaaatgtcttccagatacacatcccaaacgagtggttgtcaagctctgctttgttgtctaattttatcagaattatccaaaattcttatgataaatacagatgaattagcataactccagatttatgaaatgaaaatttccagaacccaggaatatgcattgaaaaaatgtattcctcacgtggtgctgatgtgatatgggatctgagtttagaatccaaggaaaattaccctccttgccctctagttggccagaattacctagttgaccagagttgctctcttgttatctagaggtcctcttcccttttcacattctgctctctctccttctgtaccttcctcctctcctccctccacttctgctcatccagatcccaagcccttctccattgattctcctaaaactccaaatggtcagttgccactaaagtccctctgtcccatgaacaagatttgtgggcaaatgtagaatttaagcttggacagagctgaatcagagctgcaattaaagatttccctaaacccagcagggaccagcaaatacttatagaagattagagatttcttgtgagtgcaaagggctcagagtgacctgatgctatagaccaaatcttatggtcccctcaaattcatgtgttaaaatctaattccccatatgatgggatttggaggtgaggccttggaaggtgattagatcatgaaagcagagactgtatgaatgggatcagtgtccctatcaaagggactgctgagagctccctcatctcttctgtcatgtgaggacacagtaaaaagatggcagtctatgaacaaggaaggaagccctcatcagacacgaaacctgctgacgagttgaccttggattttaccatctccagaagcatgagaaatgaatttgtttctctgctacctagtgcagtgcattatcttttggcacccagattggctacagtaccaacatatcaacttgtacacgtaatttttgaaattctgatgccaaatctttgatggcaacaggtgattgatctgctggaggaatggactgacatgatccctctttccacaataaaccagagagtaaaaacaagcaaaagtaggtcaaggtcttctaaaagccgtacctgaaaggtttccagtaacagttgattagatggtaattcaatcacacaaacaaccacggcaaagatacacaactatcagacattttcagaatagcctctaaaacaacatctgacaacattagggagttaaagaaggcacgaactttcaaaaagtcaaactttatttaaatgttattgtagaaacttgtaattttaacactatggatgaattctagggcaggtggtggcatggcatggcgatttgggggcacaagtgctgagttttgaagcttcggttttgataccctttggagatgccccctggcctccacacccctgcccacctgtcaagaagagcctgtcctgggcagcacctcagggacaaacagcccagaagcccagttgagggcagacctccaaggttggaggaagaagccgcctctgggagcaggaggagctgctggatcccctcctcccaggtttcttttcctgccccccagcgcctcttgcaggcaggcaaacaaccccagcaggagcagcagcaggcccttcagccgcagggctgcagctctgctgaatgagagaagcctctctctggcgagtcagaggagcgcaggccatatacccgggtctctacctccatgtctcccactgtgcccaggactgagcccagcgtgggagatgcgggctggggccgtgctggccaccccctctcttccacctcttgctccagccatgctttcagctccagggctgaggccagtggctagagcagatctcatgatgtcaggtagctcctcactgggctggtccttggcaggaccaggacaggggcaggagggatctggagctgctgatagctccagttctgtccctgaaggggggtcttcccctggtgctggcactggctcatcagctggcgctggaatttcctgtgttgctgcacatggaacaggagatgaaaaagaagaaagactcaccaacgtcagtcactttccactggaattttcacacacagaatcaacctcgctgaatgtaaggtattccagcccgaaaacactgcccctgcaaaggctcatagactataggccacctcaccgtgtgcctgtgcctcgatgaactccagaggctccagctggacaagaacaatgtgcagatgtggccgcgatgggatcaccggtggggcctggcctggtagggcctgccctgggctgccctgtggtacttgggggcgcctttgcccaaatggccagaggcgcctggagtgagagatgagtgaggtattgcccctcacaagagggcattagctgcggggatccgcccacagaccctgacccaaatgacggatgaataaaacgtacactgacacagagttattctgctttgccagtcctgctgagtgtcccactgcctgcacaccaagagaggtttgtcactgcagctggccgtgaatagctcgcactgcaggcatttatttagtatagaatttacaacggaagctttgagtaaatactcttgtggataattaacatggttaagagagtagttctaccaatgattaaagctcaggtaccatggtttaaagtaaataccactgggggcaatttcccgggtctacctcccccctcctccccaagaggactatctggctcaaaggctagttaatggaagtagggtaaacagacttaactggggaagcctctattgtccctaacatttaccctatgagctaatgctctaagataagaagcagctgccttcagcctgttcaattattacaagctatgtaacctttccgccttccaaaaggtttgtgactattccctgtaactttccctaatatttccctttaatatttctgccaccatcctgagtgaatcccaatagatgagcctgcgtcagcattgtgggaaaaggctctcgctctgggccctcctgaagcaggagactcgagatgtgggaatgcagcatgagaacatcttgctctcctgagcatctcccaccaagggagctggctgcgggtctgtccctaggatgtgggtgcctgattaccagagttctaagttctgttagagtccatcaccaaggaagtgaagtcacttctttaaggttccgtaccctcggctccttccttcaaaacctactcagaaccccctgggctgctggctgctcaccctccccccaggtcagctccttacctgtacacaggtaagtccacccagtgtctgcttgtacacctgtgcctgatgtgcacctggggcctgggaatccacttagggcctgtgatccaacaggggcctaatgttgattaaaactaattttgattattcctatggagaaggaaaggccttctagcaataagaagcagagttccaaatcaaatacgtaaaaatgatcaaaaccttgtaaaagaaaagtatcttaattttaatcactgaaatgttaactttttgataaatatttaaggttataatgaaaaataaaacaatactaataaaataacagttgcaggaaatgctattgagtttcttgtttgtggtttgaacactgaaaggtcccacctagttatggtcataatttcctaccttaatcttcttgttcttatgagtaatagaaaaaaacacaatgacgatgaatgtgatgatggttcaaatacacaactgaagtttagtggcagaaacatcaggtgctcccaattacagtgcagctgttcttactgaggtgagaaaaaaaatcttgttttcaatacacacgggaagcaggagtgcacgcggatatgaccgcatttctctgaacttatgtttttcacagaagagctacagtttatcctgcattctccgttctgtgatcaaaaaccatggaacagagaagagcatttcaacctgagactcaattataagaattgcgtctgccccacctccctgcaaccatatatgccacctctctgtgctgagcctgaggggttcacatatggcacagactgaggctggactcaacagtccttaccctcgcaggtgacaggcgttctggggtcacttggaggagggaagctcctgggctctgtcttctccaccagcagggggcagcacagctgcagacagaagagaggctgaggctgcccagaaggagcctaagagggaggccagccatgaaggctcaaaaggtgtccaaggatcagtcctcaatttggaagtccagtaaagtgcatcctatcccctcgggctgcagtaactccgtcctgactgtaagactcatgcagcgtcactcagggcactgacaggagcccagggacagtgagagcctcacctgggaaatgtagctggaggcgcctgggccccggtgtcagcctggggagcttccacagggctgggattccctgggagacgccccgaggtcaaggtgctctaggagggggccacagtgtgagaggacagggtttccagggcccaagcccttcacctagtattgctgcctgagcctcctgccactctcatggtcttgtccctctctgatcagcagcattctggggagctgagccctcagtcctgggcacttccagagacctccccccgccaccccttctccctctgcctttccttccagctccaggcatactgtgactcagggggcagctcctgtgctcaggggagtctcacgtgggtggggtggtgcactcaggaccctggctccaggatgtggcatttccagcctccttgaggagatgctctccacagggaaggggattctcacctgcctcaggccagagctctggccacgaggctgtccttggctcagggacaggatacacctcattgcaggaaccaaggaccacccaccctgcagaccccacaccctgtccaaaggctgtgtccctgggatgcttacagcgaccatggggcttaaagttgaatttcccatcaatatttcatgtaaacttgcaaaaagcacaagaaaaccacactgggctgagaactctggtgctattttgctgttttttacaagtttacataaaatattgattggaaaaataaacaatggcagagctgaggatggcaatggctggtctactgtggggatggggatggcctagaagtatcagccccatgggtgaaatgagaccagacgtcctgatgactccacatgggtgagtggttccttaaatgactcaactattctcactgaaatagttaactagtgtcctaatgacacaatccatcatttagatgaaatgaccaggatgggacatttcctccagccaggaagactgtggacaaattcatgaactgggctggcccagttcacctgggtctgagaccccctggatctgagtccctccagccctccaggcaggctctgaagagggggcgtcaagagtggatttagacttaggtgaccaggatgtattggggtttgaggactcagctgtgacttagggaaatggggcctgattgaatcatcagactgaggtagacatccatcagctgggctctggatttccattggtcatgacaagccagtccttggcctgaatatcctggatcagtccccagaactgcccagctcaggctcaagtcattctctacagaaaaaccagtggagtggacactgtaggatctgcccagattctttcttctgagctcacccacccagcactgctgggagcttgtggcagctgagagctgtgcctttcctgggaagtgtggctcagcgcagaaaactgcctcctccaggtttatgcccttcctcagcaagattaggtttcatgactgcctgaggccaagttctcaagactctgcctcaatataggaggaaatgaaaatcctcccagctccacagctccctgtaggaaagactgagacctcaatgtgcgtcagggtctctttccgcccagtgttgcctccctcacatcctctgtgcatgaattcctcatctcagagtctgcttccagggaacccaaattaagatcaccagccatccccaacatgggccatgcggaacctcaggaggccactgcacactggaaagcgcccatttattcctaaattagcactgtgagtatccaaatgcccaatgagatctgagtgtttcttgcatttgtatggaatggaaagggagcctgacttgccaggtgctctgggtctgagggagagttggagtcagatctccctgcagggaaacccgggacaggaggagaagcctcaccccatgcagggaccacagatgcacccacagggtgagctgcaggatggacactgcccacagggtgagctgcaggatggacactgcccacctccaccctccatgccctgtagaaaaaatcattctttccacccctccttcagcctatcaaagttgacacttaaaaagccaccacaccccacccttgtcaacaggaaacccattcacatctccatcagccacacaatctccaagattcttcaaaaaataataacactagctatgcaaagtatatgatatatatcataaataattgtacctagattatatatgaaaatgatactttttgatatgctaggtaaataaaatatattatttaaactcattgacttcttctctttgtatttataatgcgatgactagacagtgggattcccatgaggctcacatcatattgtgattgaacaaggctggtctgcagggcttcaggttacaggggctgtggagtgacctggtgcaggaaaccccgtctccatccataggacatcagtgtgaacccagggagaggcgctggtatgagagatgagaacacaggtgtgaaccacctgcttgtgcaggggactgagccttcactttgagccaaagaagtttcttttcctatcttcaatcctgaacaagagggctttctggacttctttttgttttcagatttgtgccccttcaggtttggggctgtctggagtcccagccagaggacagtgaggaaatccaggagtctcacactgactctgttatatttcatctgctggggccatcccaaactgctgtgtaccatttcctttcctggtgctcaaatagctgctccattcacctgtcatggtttcagagatgaatctaggtgggaagacaggacagtgtatgttataatatttaaatggaagctgattccattaatatttattttaatatgaaacattaaaagaattttgttataggctatagggaaagatgaaaagagattaaaagtattttgaaaaaatgtatttatcgaatgtctgtgtgtcttcagtgttgcagggttgagagaggtcagctttaggttggatgtgctcagatgaggaaaagcaagaaagcaggaaacacgcggctctgtgacctgacacataaatcacagtaaaatggaaataaatctttcaataaatgaaacattcaaaataaacgtcactctggtgcacacagaaaggcctattagcaaactttccctttgtcctgctggctcatatccccatggatcacctgtgtgcagagtggacactgtagtccccatttctcaggctgagaactagaggctgggaaggacaagtcacctgcttgtgagtgggaggggcaggattgggagcagtggactcgggctcaggactgcggccctggtcggtgctctgtgttccctccacaggatccctcccacatgtgcccgtgtggatgtgggtgcactgcctggggtggctgatgtgctccagggattcgatggtgcagatgcttcagcacaaagcttgggggtggggatgggatgaggctgcagctggggagaccagggaccaatgccacccagcagaggtttccacggggtgggcagccccatttcctggcagtagagacagcctggaggtgggtgccaagcagagggcactgcagggtgtgcccaggcctggagggtcacaaagacacaggcaccacacagcagagtcactgaggaccagaagctcactcaggtaagggatttcagcagaactttctctcctgagcaaatcaggtacaaaaaaattaagatcctgccatcagaaaagacaaacaagaactttttatctcctcagctgagccccactgtccagggaagcagaagtctctgagcccagcccaggtgagggtggggtgaggagaggagctcagggtggagatttgcatggaggccccaccctcctctgaggcagaggggataagacagggctgggggcaggcccagtgctggggtctcaggaggcagcactctcgggacgtctccaccatggcctgggctctgctcctcctcagcctcctcactcagggcacaggtgacacctccagggaaagggtcacaggggtctctgggctgatccttggtctcctgctcctcaggctcacctgggcccagcactgactcactagagtgtgtttctccctctttccaggatcctgggctcagtctgccctgactcagcctcgctcagtgtccgggtctcctggacagtcagtcaccatctcctgcactggaaccagcagtgatgttggtggttataactatgtctcctggtaccaacagcacccaggcaaagcccccaaactcatgatttatgatgtcagtaagcggccctcaggggtccctgatcgcttctctggctccaagtctggcaacacggcctccctgaccatctctgggctccaggctgaggatgaggctgattattactgctgctcatatgcaggcagctacactttccacagtggtccaagttcctggggaactgagaccaaaacccaccctgggctctcaggctcccttttgctctgaagatgcttcctcaccctgtgcaaggggcttcctgcagcacggccttgagaattcttctctctcagctcctctcctttcccaccatgaaatccaacaggaaacctgccctgtggtttctcatcccggacagggacagcttcctggtgcttgtgtgctgtggtccctgaatgtgcagctcttcccagctcttcaaatgcagggacagtgacaagcagctgcctgattggtgcagtcactgcttttttttcagagatgtcttcaccctacatgcatcaccatctcccacactgtgggtagaattttagccaaatatggctgggcgcagtggctcacacctgtaatcccagcactttgggaggccaaggctggcagatcatgaggtcaggagatcgagaccatcctggctaatacggtgaaaccccatctctattaaaaatacaaaaaattaaccgggcacggtggcgggcgcctgtagtcccagctacttgggaggctgaggcaggagaatggcatgaacccgggaggcggagcttgcagggagccaagattcgtcactgcactccagcctgggtgacagagcaagactccatctcaaaaaaaaaaaaaaaaaaaagaattttagcaactacattctaatagttatcgccacaactttgatcttaaataacagtgcagtgaacatccctatgcagcctcctttgagttcctgtgtgaatatgaccataggatacatttctaaaactgaaattgcgggtcagaaagatgtgtgtttgtaattttcacccattgttgtcagattcccctccagaggggttctaccaacttacaatgccaaccataagtatttgttcagagtacattgttgaaagtgtaaatttttgccaacctaccagactgaaaaatgttatcttgttacagttttatttttgagtctcccattctgcttaaggttgggccttttcacaaatagttcagtactctttatttttttagtatttggtaaactttttcttgaatatccaaataagaagaattttagtctttgtggcaaggcacagtgggtcatgcctgtaatcccagcagtttggaaggcttagacacgtaaattgcttgagcccaggagttcgagattagcctgggcaacatagtgaaccctcatctctattacattaaagaaaataaacataaattttaaaatgaagtattttagtctttgtggcccacgaatcaactttggggatattacataggtacttacagcaccatttataaagtaaccatttaaaatgataaaaaccactgtcagctctgggccacacaaaaacaggtgtcaggccagttctggcagggtgagggctactatggtgggaaagggaaatggaagccagtagagcttctcctacctagaaaaatagtaaatcaaaaacagtgtcatatccctggagggattgcagagattagtgccaccatcaaggacttgaaagacacagaggtggtgatcagcaccacatccctgttcaactctcccagttggcctgtgcagaagacagatggatcttggagagtgacaatggattatcataagcttaaccaaatggtgacttcaattgcagctgctgtaccagatgtggtttcattgctcaatcaaattaacacatctcctggtagctggtatgcagccattgacttggcaaatgcctttttctccattccggtccattaggcccaccagaagcaatttgccttcaactggcaaagccagcaatatacctttactgtcctacctcagagatttatcaactctccagctttgtgtcataatcttgttttttttttcttttgagacagagtctcgctctgtcaccaggctggagtgcagtggtgcaatctcagctcactgcaacctctgcctcctggattcaagcaattctcctgcctcaacctcctcagtagctggggctacacgcgcgcaccaccacgcccagctaatttttgtaattttagtagagacggggtttcaccatgttggccaggatggtcccaatctcttgacctcgtgatctgaacgcttctgcctcccaaagtgctgggattacagacctgagccaccatgcccagccctttgtgtcataatcttattcaaagagatcttgatcacttttcacttctgcaagatagcacactcgtccattacattgatgacattattggattggattcagtgagcaagaattcacaaacacaatggacttatcggtgagacatttgcatgccagagaatttgaaataaatctgactaaaattcagggaccttctacctcagtaaaatttctacgggccaagtggtgtggggcctgttgagatattccttctaaggtaaaggatacgttcctgcatttggctcctcctacaaccaagaaagaggcgcaacgcctagtgggcctatttggattttggaagcaacacattcctcatttggttgtgttactctggcccatttattgaatgaccctaaaggctgccagttttgagtgggttccagaagaagagaaagctctacaacaggtccaggctgctgtgcaagctgctctgccacttgggccatataacccagcagatccaatggtgcttgaggtgtcagtggcagatagcaatgctgtttggagcctttggcaagctcccataggtgaatcacagtgcggtcctccaggattttggagcaaggccctgccatcctctacagataactactctgcttttgagagacagctgttggcctgttactgggctttggtggtaactgaacattgactatgagtcataaagtcaccatgggacctgaactgcctgtcatgaactgggttctttctgatcaatgtagccataaaatgggtcatgcacagcagcattccatcatcaaatggaagtggtatatacatcatcaggctcgagtaggccctgaaggcacaagaaaattacatgaagaagtggctcaaatgcccatggtctccactcttcccccctgctttctctcccccagcctgcaccgatggcctcatggggagttccctatgatcagctgacagaggaagagaagactagggcctggatcacagatggttctgcaagatatgcaggcaccacctgaaagtggacagctgtagcactaaagcccctttctagaacatccctgaagaacagcggggaagggaaatcttctccgtggacagaactttgagccgtgccactgggtgtgcactttgcatggaaggattttagccaactacattctaaaggttattgccacaactttgatcttaaataacagtgcagcgaacatccctgcatccctgcatggaaggaatgccatttcccataaatcaccaaatcactcagaatgactacgcataagcccttaatatacgccagatgcattggttattgttttacaagcgggacctcaagaagactttcataatacggaataggatgatgcaaagccctatgctcaaggcccgatctttactagaaaactagtattgggaggttacatgttttccccaaacagatctttgaggaatcccgcagatgccaaagacctgctggcctaagagtagacacttattttctcacagttctgaagctggagagccaagataaaggtgtttataggtttggtttcccctgaggcctctctccttggcttgcaggttgctgcctccttgctgtgtcctcacatggtctttcctctgcacactcatttctggtgtctcacttctgcgaatgcaaatttttattagcctgggttaataatttttatatcagcctggcagattctatcactgatttacttgattatcctatttacttgattattaaactccttctctgctgaggtcacccattggtgagcactcgcatgggatacaaatatcttcacagtttttgatcactcagagggatccatccacatagctcttccccaaatttctttgtcatcaattttccaatcatgcttcttccaagtccctgatcatccaaccaaaccattggctacagcctatgaatcagtataaaattgcatatctggacatttctccttccaggcagtgctgagaaaagtggacatccacatgcagaacaatgaaactggacccatctctctccaaataaaaaatcagcccaacaaggattacaaacctaaggataagacctgaagctataaaacaactagaagggaacatagataaaattcttcaggaccttgggatacacaaaaatttttatgactaagacttcaaaagaacagacaacaaaaataaaaatagacaaatgggagtttattcaactaaaatgcttctgcaaagcaaacaacagattgaagacacccttagaatgggagaaagtattcatgtgaataggtcctaatatcctgttcatctgaaaaggcataatatccagtgtaagaatagaggacaaggctctaaaataactgattagcattaaaaaaaaaaaaagtgggcaaaggacctgaatagacttttctctaaagaagacatacaaatggcaaacaggtatgtgaaaaaatgcttaaggtgactaataatcagggaaatgctaactaaaacccaaatgagatatcatctcaccgctgctggaatgactatcatcaaaacataacaaggctaggcgcggtggctcacgcctgtaatcccagcagtttgggaggccgaggcgggcggatcaagtggtcaggagatcgagaccatcctggctaacatggtgaaaccccatctctactaaaaatacaaaaaattagctgggcatggtggtgggcacctgtagtcccagctacttgggaggctgaggcagaagaatggcatgaacccgggaggtggagcttgcagtgagccaagatcgcaccactgcactccagcctgggcgacagagcgagactccgtctcaagaaaaaacctaacaaacacccgtgacgatgaagagaaaatagaagaaaaaatcacatgactgtctcaacagtcagatcaaatgttttctttcaaggaaacatttttgttggttgttttttctagtcttgttagagcatcacgcatgataagatttgtggtacagaagttagaggggatgttgttccatgcaaaatatctgaatatcccatacccaactcttcggttacttactgataaatgctaaaaggttacaattttgtattttcaaatattctggtggccagaaacctcttccttgacaagtctggagtacaggtatctgactccagatgattagaatttaggcaggtattgtgtgagcagtgaggtcacacacaggaaacgttccagtcaaagagaaaaacagacggaggctgaaacacagagatcatatgtctgagaaataaggaaattccatactaatgggagctgagtgagaacaagatatgaaccatctatttctctctgaatatctcattgggatcttgtccctttcccagcataccactcatgtggattttaaaattgtctgctcttaaaacatttcttgcacatcattagagagtccagcactggaatcaagctcagtttgatgagaccagggcagttaagcaccaaacccaggtgttcttagaagggcttgtagaagacaaaggtgtgttgtcaaaagcagagaaagtgagactttccattgtggtttaaaccacagcttctggaatttcattgggcacacaaatcccctgaggattctggttaagatacagctgtgccctcagcacatctgggtatggccccagattctccatgtctagcagcttccaggtgaggctgatgctgctggtcctccaaggacattttgagtggcttagctcctattcaccctcctcacgcaggcacaggtaagactcacctaatgaagaaacctgagaagcacaggtgaactctccctcccctcctggtgtcttagtaccttttgtgttgctataaaggaatacctgaagctggatagtttgtaaagaaaaaaaagggtttattggggtcatgcttctgatggctggaaagatcaagattgggtatctgcgtctagtgagggcctcaggctgtctccactcatgatagaaggtgaagggaagccggtctgtgcagagatcactgggagagagaaagcaagctttttttcctaacaaagctgcagggatgtaattgagtcatattcataaagtgctcaatacagggcgtaacatattcaagtgctccttagtggacagcaattattactgaccttgctcatgaaaattagacctcagatggaggaaaggcagtgccgagggttttagattgttcgaaataagagagattaaaatgatttaaaatagaggcccaggagctgaggcaagcatccccaggtgttctcctgccaactccccccatgtctcagaagctgttttcaggcaagtcagccagggaggaaagtgggggagtttgtagaaccaaggattgcaacttcatccatgaggaggaggtgtagccagccaggtggggagaggctgctaagctcatctgaaggctgttgaaggctttctggccccatggtcctgggccatccctccctgcccagggccgcattcctcagctgacagccacaaccttgagagaggcctgtgagtctgatcagaaatcctgccagggccccgagggggcaggcatggaagggaggtgtctaaggtcacaggagacactatttgctgcctgtggggctgggacaggctccttgagaggaaattcgggcactgtacgggaggaaaacacaggacagggaggcctctccccaaaggattgtgatgatagagaccaaagcatctgcaaagagcccagccctacaggggattctctgaacacagcattcctcggggcgtctgtgttattttgccagggttaccataataaagtagcacagactggatgctcagagaaaagaaatgtcttctccactaatctgtaggtgatgttagaatctgagatcaaggtgttggcagggttggtttcttctgaggctgagcgagggcctgttctgtgcatctccctggcttcaggtgcttctggaaggatgtgctgttccctgaattacagacaaacaccccaatctctgcctccatgttcatatggcattttccctatgtgtgtctctgaccatgtttcctcggttttttgtttgtttgttttttgctgttgttgttttgttttgagatcgaatctcgctctgtcgcccaggctggagtgcagtggcatgaccttggctcactgcaacctctgcctcccaggttcaagtgattctcctgcctcagcctcccaagtagctgggattacagatgcctgccaccaccttcagctaattttcatatttttagtaaagatggggtttcatcaggttggccaggttggtctcgaattcctgacctcaggtgatccacctgcctcagcctcccaaagtgctgggattacaagcctgagccactgcattcagccatttcccccttttataacaacaccgctcctgttggattgggagcccactctacttcagtatgatgtcatgttaacccattacatctgtaaccaccccattcccatataagatcccattttgaggttctggggctgaggacttcaatatcaattcggcgggggggagcctacaatgtaaatttgtaacattgtctctgtcatgggccagctgtcaatattccctgaatatccaggatccacccatgctctctggccatcaccagagtgagcaaatccctgacacatggataagagttgcttccatgggctcccagccaggctggaaattcttgattcatggaatcaagaatctttctccagtgggtggggctaaatgcagctgcctccctgacagtctccctgggacactaggcttatcagcttttctcctaaagctgcaggtcctgactgtcctgagccccagctctgctgtggtctttgcatcttaagatcttattcaactcgcttttgtgcctcagtggactgacttacaggaaaacagtgggagatgcccctgctctctctccccagggtctcctcccctcagtggcacaagacctgccctattgactggcagtccccccatgcccatctcaacctccacactgcccactgtgcacggtcacaggtcacaaactgattgttcactttgggcagatcaccttgacagtttctgcagaactgggtgcttcttcccagaatcaggaatttacaaacaaggccagttctagagatgcaactgggagagtaatgtgcatcacagcgaatctggacaagacaaagtggttttgctgtagttctcctggaacacattctggtgatgtgtccatctcccaggatagtcttagcaagttacatccaatgctgcatcaggacccacaagaaaaggaactggcctgcatgagtggccggcagggtcctgggaggagaccctgagatgcccagtgacaggaggagtggattcttaggttggtaagcgtgtggaggaactgcgagtgatgtgctcagccaggtacaggagcaggcgtattggtgacctgtggcctcatcttatctcagttgtctctttagaccaaactccaggaaatcagcacatagagacttctgtctgtctccgagatcatcgcaggacttcacacgtcttttctatttataatacaacatcatgttgtgattgaattactttcatcacagcctcaacagtcctaggtctgaaaactaatacatatacttagaatattaattaaggaatactttcttgtcaattatgtttattaaattaaaagacttcagtatctagtgttacagctgtcctaattcaacagccttgaccttcttagaaataaaatcctgatcccaaatttttctggggatatgactggcacaaggagccaagcagacatctggatgtcccagtgtcactgctgacatgtgcttttttgttatctgtcatggggtgaacagaggaagtgtccctacctctgtccacagaacccatcaaagacagtgcacctgattaaagaagagagggttgtgatcagaggggtccggggtcctgggatgaggtgggaggaggagactcatgggaagaaaggaagcagggcaggaagaagctgaagttcaggctctgaggtgcatctcctgcatggaatcttgactccactcacttctgtcattgtgtaatctttcaatgttggttctgtcatcagtaaacttgaggagaggttatgccataagcatagggctgaggaagggttattataaatatccagtcatggttgtgcctataaaacactcaccaaagactctgaatatattaaggtctcataagtagttgttttgcataatctagtgatacatggaggatggcattcctcctgtggacagcaggaggcactgtgggtgtatcgtttggggatgctaatagctccaagtcccccagtagagctcacgtgcaaagggtgtgactgatgtttcctttcaggtccagtctttttgagtacaatccactctccactcctgacacccacttggcccttctcctgcctttgagaaatgactaccctgaggccatcagctccagggctcagctatgagctcagacagacacgcttgggaatagagaacagatttggattcaatgctccttccttcttgagcttcaagaagaggataagataggagctggttgtgtccaggctccactgggcagcctcgatcagagctctcggaagtgcctcccaccacggcctgtgtctccttctacctcctgcccttcatattctccacaggttggagcatccagagaattcagggaaaccctttcactgctatttccccccagcactggtcctcagtggcattctttccagttctcctgtgcattcagcatcattcatgaaattatatgtttccaggtctctgtgctctgtctgtgctgacccagcccccgtctgcatctgcctggctgtgagcctcagccaaggtcacctacaccagtgaatagtatcaacagagaccaaggaggtccccctagtgtataatggaggttaagagtaatggcagcgacagcaaggggaacaggatccccagtcacttattgggctccagccctggggctgaatgctacttaattatcttcaacctccaatctgaggatgaggccgagtatcactgtggagagagccacatgtttgatggtgaggatgggtgagccacagtgacacagaccaagaagtgaggccaaaacataccccctccccttcctcttcaaggactgagagtgagaagccctatgtcatctccattgaccctgagaatgttgactctccccctttcaaatttcatcatcccagatgtcctccctcaagacacccttaggcagaggcagatgcaggccatgattgaggccattttgataagtcatcaatctgtttccaccacaccagcctgtggggactacactgggagagaccagaacagcccaggcaggaaaacggccctgagagaggggtcgggctgagatgactgcatccagtgagtgccattgcaccctgcacccctgcctcaggggactgtcatggggctctgcctgaggaggcaacatggatcttgacatgtccccagccatttatgagaactgtagttgtgtgcatcctcattaacactcaatattattgtcagtttttgtttaaagccactctaatagatctgtagcgattcttattaattttttaacttgtattttcttagcaacatcaggctgagcatcttttcaggtgcttgttatctgtatatcttctttggtgaaaagcttaatcaaatcttggtctatttttaaaattcacttttccccatattccccttcatgcagtatttttcaaaaatggtgaataaatgaaagttttgctgacatttaaaaactcacagaattgttcaccaccagactgttgctattagaagggtaaaggatatccctagacagaaggaaagtgatgtcacattgaaatgtgaatttacacaaaaaagtgaaaacatcaggctgggcccagtggctcatgtctgtaatttcagcactttgggagactgaggcaggagtattgcttgagcacaggagtttgaggctgatgtgaggtatgatcataccactgcagtccagcctgggcaacatattaagaatctgtctctattaaaaaaaaaaaaggaaataaaaaaattaaatatcaggtacagtaactacatagatacttgtgaaaacctctgtattatgttaatgccaataaaatacagttcactgatcaaagataaattaataaaatacattgtgatttataatgaaaataaaggcaaattatatgacaaagacagcacaaaatctgtggtgggtgaagaacatgttatcaaggtctcatatgggaatgtgtaacaactgcaggtagattttcataagatctctatatacataaaccttaaagtagtcattaaatcaaaccttttgatcaaaaaagaattagagcgaataagctacattagggttatccacagaaacaaaattggtaagatatatatgtgtgtataacatacatatgtgtatatacacatgcatgtatgtgagcatatcgagagagagagagaaacttaaaagaagaaattggttcataggattgtcctgtctgacaaggataaaaatctcttgggcaggctgaaggctggaaatgcaggtaagagttgatgttgcgtcctgagcctgaattcagcaatacaggacttaagaaatcctcactctttgctctaaacacctaaacactttcttttttttttttttttttttttgtgagacagagtctcactctgtcacccaggctgggttacagtggtgtgatctcagctcactgcaatcgccacctcccagcttcaagtgattcttgtgcctcatcctcccaggtagctgggattacaggtgtgcaccatcacatccacctaatttttgtatttttagtagagaccggctttctccatgatgaccaggctggtctcgaactcctggcctcaagtgatcctcctgcctccttggcctcccaaagtgctgggattacaggtgtgagccaccaggcctggcctgctctatacactttctactcatgaatgaggcccaccgcattgtgatgagtaatctgcttatacaaagtctactgagttaaatgtgagtcacatctggaaaatatcttcacataaacttctatgtttgtactggacaaaatcaacctggaaccacatcctagtcaatgtgccacttaaaattaaccatcacttaagccggcatgaagatagaaaggaaccattttttaaagcaatcaaaaacagagacagagaaagggaaagaaaaacaaggaacatatccatagattgtattttttaagtcactttttgaggttttctgttgttttcctgttttctatttcattgatatttggctcttaactatattaataccttttctctatttaaattgaatttcaatgctctccttttccttagatttatgaggtagaaccttagtttattttagatcttgcttctttccactgccaaacattcaatccaatagatttatttaaaactacttacttatatctattttttaaattttaatacatttgtttttgtgttttaaaagttcagtattttctaattttgttgtgatttttttctttgacttatgaaatatgtagttttatcttctttcatttccaaaaaattgaagatttaccacagttcatcatgtatcaattccatttaattagttaattctgcattaaatcataccttgcatgagcttcatattttcaaatttgttaacatttgttttgtggcctagaataggaagtatcatgaaaaatgttccctgtgtatttgaaatagcaatgtttattctgctgctgtgggtatagttttctacgaattcaattagcctaagttggctaatagttcaaatatatattcttactgtttttttgtgtatttattttgtaggtctgtgagagagagagctattgaaatgaacaacactaattgtagaatttcccattgcttcttttgagagaggaaaatttccagtcatggttcttaatactttattctcctgacaaaaggtcacctatgattttccaacactaatcaaggaaaaaaaaaaggcagagttaaagccacactcatggatgccacgggagcagtgggtgaccacatgatgtccctccactggttcagtagatttagcgagacattatattttggcttttaaaaatcataaatctggctaagacatccatgaacaaatttgaagacatacacattgaataaaatatgaaaattaaaagaaaggtaactgcatacgtaaaacattgctatcacagcacctgactcatgggaaatggataaaaagtattataaattcaattacatttacttacacattaaacaaatatgaatttaaaccagttcactaaactgtctcatatactgtttaggtgatggagatttattggtgcacaaaaaagacaagaatacctgctctcagagtggcatcatggaagatggtggagtacgaagctccagcaaatggtccctcctgtgaaattacttgaagtggcaagagtcatgacattaactctcataaaacaacagaatcttgtcccacatttgcagtattcagggatgtgccgatgaagagagagacataaaataatctctgtcaggtcaatttctggccatggaaataattgaacagaaactgcatggatcactctgacaaggaagctggtccttaccaaaatattttggaaatgtcaccacgcaattgaataacagcacctttcagcaagcaacatcagccaaggcagagaagagagacaatctgatttcgagagtgacaatatcataacatccaaaatacccagatctcaagaaaagtttacaaagcagacaaacataaaagaaagcaagacccactaaaaggaaagaaataaatcaactgaatgcattcctcaggaagcacaggcattgcacgtgctacacaaacacttcaaatgaactgcccgtatatgctcaaaaagcaaaaggactccatggaaacagaactaaaggaaagcagggaaatgatgtttgaacaagcatgaaatatcaataatgacaagttttataaaggaaccaagcagaaatactgaaactgcaaagttcaatagctgaaatcaaaatctcaccagaggagttaagtagtggtgtgagcagacagaagaataatcggtgaacttgaagatacatcattgaaattccacaggatgagcataaatttttttagaaaagaataaatgaacaaagcctaagagacatatgagacaacatcaagcatatcaatattgctttatgggagtttcagaaagagaagaaaaacaggaaaggaaaaataaaatacataaagaaaaatagctcaaaacttctaagtttgatgaaagattagaatctatactttcgaggagctcaataaactccaagcaagttaaactgaagtctgcagtgagacacattctgatcaaagcatcaaaagccaaatacaaaaggaaaagtgtaaatagtaacaaaaggagagttggggtagctaaagcaatttcagacaatataggcttcaagttaaaaatgcttacaagagacaaagaaaggcgttataattgatgaaataaccaactagtcaagaagacagaataattatgcaccaagggatagcacttcaaagtacataaaggaagaccaatttgaaaaaaaaaatatgtagatctataatataacttggagacttcacttctccacttttactgaccacctaggccgggcatggtggctcacgcctgtaatcccagcactttgggaggctgaggcgggtggatcatgaggttaagagatcgagaccatcctggctaacacagtgaaaccccgtctctactaaaaatacaaaaaaaaaaaaattagctgggcatggtggtgggtgcctgtagtcccagctactcgggaggctgaggcaggagaatggcatggacccaggaggtggagcctgcagtgagcagagatcacaccactgcactccagcctgggcaacagagcaagactccatctccaaaaaaaaaaaaaaaaaaaaaaaaaaaaaaagataataagagaagagacacaaataagtaaaatcagaaatttgggacaatagtacaaagcttatggaaatttaaattataatagaagaacacacaagcaattgtatgccaaatcttagaagatatggacaaattcatagtaaacacagattgccaatctgactcaagaaaaaagagaaaaaaatcaacagaaatatagaaaataagggatgtaaatcagcaatggaaacttccgaaaaaagaaaaactcaaaaccagatggcctcactggtaattctgctaaatgtaaaaaggagttgatatcaaccataatcaatctcttcccaaaacagattaagaggaagtacttcccagcacattcgaagaccctagcattagcctgacaccaaaggcaaacaaggatagtattttaaaaaaactaaactaaaggctaatattccttaagaatgagcatgcaaaaatcctcaacaaaataaaagcaaaccaaatccaacgttaagttaaggggaataaaggatttcaaagatggttctacataagaacatgaatcaacgtaatatatattaacagagtgacagaaaaagtgtatgatcatctgagtagatgcagaaaaagtgtttcacaaaattcacattttcctgattaaaaaaaaaacacacactcagcaaactcggaatagaaggaaacttctacaaactaataaaggacctttatctaaagccacagtgtacatcacattaaatggtggaagagtaaaagcttccctactaagatcagggacaaaacaaggactcctgcctccacaactactatttgacattgtacagaagttttagtcaaagctcttaggcaaagaaagaaataataggtatctagaatggaaatgaaggagtaaaatcatccctatttgcacagaacccgattctaaacgtacaatatcccaaagaatacacgcacagaaaaactaacaaagtgaataaacacattgaaccaagtttcaaggtacaggaacaactggacttgccacaacttttctttgttatcctgggcattagttctcttggcctcaattttatctttaaaactgggaggcttatactgcagttgagaaaaagacacaaaaagaacctgttagttaaagatggaataagtgaatctcagagggtggacataggttggtgaggtcctgtccatctctgggggcatttttctggagtgtgggaaagcatgttcccagatgtgttagcaagatactcgcaattttctcaaaacaacagacaaggatagtgtagaaatcctcccaccacaaattgtgaacagtgtgtgatgaaataaaaataacagtcatagaaaaagatggcgatgatgatgataatgacttaagtacacaactaaggtttagtgatagaaacatcaggtgttcccaaattcaatgcagcttttcttataaaatgggggcaccagtcttagttcccatatatttaggaattgagggtccccatgaggtgtcgctgcatttctctgggcttttatgtttatcacagaagagctacagcttaccctgcactctccagcccgcaatcaaaaatcatggaccaaagaacaacatttcagcacaagactccattatgggaattgaatctgcccaccctcccgaaaccatatacacctttctgtgctgacatgagaaaaccacagtggatcacactggctcaaagtgaggctggactcctttgtccccaacctcccagatgacaggtgctgtggggtcacccggaggagaaaagctctcctaggctcagtcttgtccaccagcaaggggcagcagagctgcagccaggagcagccagaggctggggctgcccaggtggagcctaaggggtaggcagccctgggaggtctacaggtgtccaaggttcagtcctaggattggaagtcaggacagtccatcctattgcttctggttacagcgaccatgttctgagggtcagactcaaacagcatcacccaggacaccgacaggagccggggcacaatgagagcctcacctgggaaatgcagccggaggcacctgggcccagatgtcagcctgggcagctcccacagtgctggaattccctggaagatgccccaaggttgaggtgctctaggagggggcccagtgggagaggatggggctcccagggctcaagtccttcacccaggatggccatctgagcatcctgccactctcggggcctcgcccctccctctccagcagtgtcctggggagctgaaccctgtcccaggcacttccagggacgcctgacccctcctccctctgcctctccttccagctcgagactgactctgactcatggggcagctcctgtgcgcaggggagtctcaggtgggtggggcggcacattcagggccccggttcctgggtggggcttcccgggcctcctagaggagatgctctccagagggaagggggttctcacctgattcaggccagagctctgaccacaaggctgtccttggctcagtgacaagagtctgctgcattgcagagaccagggaccacccaccatccagagctcacactctgtgcaaaggctgtgtccctgggatatttgcagagaccaccgggcctaaagttgaatttcccatcaatatttcatgtaaacttgtaaaaagcaccagaaaaacacactggactgagaaccccgatgcttttctggggccttttacaagtttacacaaaatactcataggaaaaaataaataaataatggaagagctgaggatggcaatggctgatctatgtggggatgggggatggcctaaaaggagcggcaccatggctgaaatgagagcagacgtccagatgatgccacaagggtgtgtggttgcgtaaatgaaccacctactcctactgaaataattaacaagtatcctgacgacacagtacgttatttagatgaaatgaccaggatgggactaagtaatgctgggggacccagagaggagggggaatatggtgggttcttggtccacctgctgctgagtcaggtttcatcaatgatctctcagcagggccaaactcagccccaagccaggtttctagaaggcccgcagccctgctgagcctggcccaggacagaccacaggtcagagaggtttgggacagtggtcatatggccagtccccaggaaggtgactgtgatcacaggcctcagaggtcgaggctaattttctgaccaaagacccaactccttcttcagtcacctgtgctgcccccacagctagtttgagtgacatctttcaatgaggagtcccagaggatagaaatttgcatgaacaccaagcacttactgccccatagggcctgggaaggaataagagaggcctggggagcccagctgtgctgtgggctcaggaggcagagctctgggaatctcaccatggcctggacccctctcctgctccccctcctcactttctgcacaggtgcttctcccaggccctgccccaggctcagtgcccatagaccccaagttggccctgccctgaaccctgtgcaaagcccagacacagtcttagggtaggacccctgggaatgggctcttgatcttcaagccccctctcctgttttccttgcagtctctgaggcctcctatgagctgacacagccaccctcggtgtcagtgtccccaggacaaacggccaggatcacctgctctggagatgcattgccaaaaaaatatgcttattggtaccagcagaagtcaggccaggcccctgtgctggtcatctatgaggacagcaaacgaccctccgggatccctgagagattctctggctccagctcagggacaatggccaccttgactatcagtggggcccaggtggaggatgaagctgactactactgttactcaacagacagcagtggtaatcatagcacagtgacactggcagatggggaagtgagacacaaaccccttcttcatctattttaccctctccctccagccccaggaccgctgtggaccaacccataagcaggtctggcagaattcacctggttaggagatccttaagctgcttttccctccactcctctaggcagactttgcaggaatgagtcaggagtggatttgggcctggcagggccagactgccctgtgtttccttgcccacggtttgagttgtgaatggagagtatgagtggaaagacagacacagcgggacatccatgcaggcatgaacagcccagagcgacaggggaaactttcagctctcagttcaatgcagtcattgttttatctcttggaagaagcatttctccagtgcaactaagactctagactcacagagcccgaggttgtgggggaggacattaaattttgctcatggatcactaaggacgtttttgagtggagccactacaatttattcattgattcctggactcatggatcctgactgtgggagaaatagtactgcatattgggcactgctgtacagcgcatgccccatcctcaaagtcattgcccaaccttacatgtttttgccatcctgctgccacagtaactgagtcttcaagcagacactgagccattcatataagccagatgccacattggtgaagatggtaagacacttgaatgccatgaggatgggcccatggttgctgtttatttgctgtgatatgagttccttggtcaaagccccctgtggaataccatcatggtgggtgaagcattctgtagtccagagataaaaggtttggcagaagcactgcagtcaaagaaagcaaatccctgtctatactaagtgtgtattctggcaagagcaaagagctatccctgccatgaaggaacagctttaatgaaattaatatcaaccaggcatcctatagggatcttcctgttggtcttcactgttggcagatggtcactcagcagtagctacagccaggtcagctctagtgagtggtagtccactttgatgagtccatggacagcctccttttctgcaaccatagggcatttgttattgagccaattgggcaatgatggcagtggttggggcagactgccaggtgtccagagagccacccatcctaccaacctgtttagcaaaatcaattccttctcatgtcagacttcacaaaatattcacataggagataaatattctcatgctttctgcttgctcacacatctctccctcagacacagttgtgatcaatattctgattgtatttcctgtgtccctgaacatccttgatcatcttccaagtccctgagtcacagcccatgaactaggaacctctgcccgtctctctttgcagatgacatgaaccaggtacactgctctaagttctgccttaaggagagtgttcctccaccactgctgttcagggaagcccagaggccaggtgggatactagcactgtccacagcagggatggctgcatgtcctgcagaaacctctgtaaccccagtctaagtgcctcctcctaggcagctggtcccagggagcccctcaggaggcccaggctgtaaggtgagaggatggccatggggcaggagttggcccgtgtctatctggccacctcttcatgcaacttatttgtccttgtgacctgatccatcaggtctcaggtacagcccagccatgtgatggggaggccactataaatggccacctcggactgggggtcagataacatccagctcattggcagcttgtgtcccatggtgagctctgtggccacagtcacaaagagcccctgttgaggcccaggagcccccccagtcttcctctaatggagctttctgctcatttagaaaaataacaatggggaggttgctcgcctacctcaggtctagggtcactgggaccacctagaccacatccatgatcttgtctgattattctgattccttgttggcttagctatgcattagtgtaaccaagccacagtgtcttaggcactaaaatgccactacttggcccctgcctaccctggggtcctgtcaaccacatcttggtatccaattcagttttagcaccactaagagaaatctatttttatattgagaacaggaaacattagttatttctattgtggaaattttataagacaatagtgtggaaatgttttaagagacattttacttagagtgaaagaccttccattaaaccactcaataaattgctccataaatggccagcccaaaccctgagttcagaccaggcacagcctcggtgttgggaccttctgggaatgggtctctgtcatcaacccttctctaccctcctgtctgcacagccctgggcctcctacatgcagggacagctcccctcagtgtcggtagccctgggacagatgaccatgatcatatgctctggagataacctcggaataaacacgcattttggaacaagcagaagccaagccagacctcaatgtcggtcctctagtataacatcgaccagccctcagagacctctgcttaatttttaggccacaaactagcgaacatggccaccctgaccatcagcagtgcccaggccagggacaaagctgactattactgtgcctcagattgtgacagtgggggcagctggcagggactcacagtgacaaagacagatggggacttgcaacaaactgtcccacttcagcctgcctctcattcttacctgccctctgagcagctgtaggtcaggcctcagaatcaggtgtcctctctggtcctcacctggtccctgcagggccggagattcgtaacagcttttccatactctcagggcctacatgtgttcaataaaacctgtacgggggaagctcgttgaagctgcaaggaccttttacaggtttgtagaacacatgagaacttcaggaatccatatagtgtcacatggctccatgtgtaattacacgtcacacagggaaggagagagctgtttcacagggtgcaatcctactggaattcgtcttttccttgcgtagaaacagcttagtggaagccgtgtctcctctggtttcctagatgagttgaccccacattgtaatggggcacctgaggcctaaggaggacaggagacccaacccctgtgggccccaggagccttcctgtcctgacatttcacagaaactgcagaggaagtgcaggcccaacctttggttccacctggggactgtcttcagggaacactgacctttcccagtccccaaattcccaggacctgtctgacctgactaggtgtgcctccagctccctgatagcttggattttatctctgggctctgggctgctttctgaggagctcactaagaagtccttggtgccaagtgcaggacttgcccctctgctccatatcccgggtctgcaggcacaggggacaggtcctgctaggtgaggctggcaccctcttccaggagggatctctcatcccaggccctagggacaggttcactgggctttcttttctcacttagaatctcttagtctttttgtttccttctttaagagtacaactgctttttggtgaaatcatgtgtatacatcaaagttaacagactactgtcacaagcgcatatatatacacatcctcttcctagatggggtaaccgtggacactctgccatagtcgtctttttgtttctctctctctaccacaagtgagactattaatagcactcttctatgcagaccataatcatattctccagttgcacaagaacgattcttatagttgctcaatttccttgcctttcaggaccctgaagtttcccatgcccacatttggttgccatgtctctctgatccaacagtattccttggaagccgaggcttatgaaacattttgcaaaaagttccacaagaaaactcaagttccttgtgcacagttggaccatgttcattgtgtgcagtagaacctcgttccagtgttgagtccattttatgttttgaccatcaaagggaagggcattatgacttttggggactgagtcgatggaggaaagatagcagtcgatgatgaccttatgcactgacgtgtatgtggccaatgtctatagatggatttggaacttgaaggagctgttcgttctgcagatggaatttccagtgccgcatctccaccacccagccactagcactcggcaggtgctctgtaagaggaagcccttcactgccaatcagccattacacaggtgaaggtgagtgagacttaatagctattaaccctcaaaacaaactgaggaataaactcaggttcacaaagtgactttgcgggaacagcctgaggaagcaagttaattagtagcagaaggttttgcccagagcaggaggaatcacaggatcactgaggacctagtgataccatggtgtggaggtgctgtgaggcatggtgacattcaagaaaacctgttctctacaaacacctacctacccacaggcacagcagacaccccagctatgccaagggctctgtcttcctctagagtaagagcctggtagcaaacaggtatcctctgaaaggcaggtgccccatcagtcagctctgcacgactgaaacaaaaggaaaattgccagagaactttccagaaaacagtcaacctgcttgtgctggtgcattgatggtgacccaggatcagtggaagtaacagtagcttaatttccccatggctgcatgatggacaccgggagagaagtgtggaggcggattaaccaccactctaagtggcttcagccctaggtaagcaggaacaagtgagggggctgagcccacttgtgtctaatcagtcccagcctcagcgactgcatcctggagaccaacagggagtgtatgcgctcagcccctcccagattgctgagcataagcaagaaatttccctccgcacacctgacgcaccacacacctgcccccagctcctcacttacaagacaatatcaaatcagacagggactggtctgggtcccagatcccctcaggttgccgctgtcctctcagatccccacacacagcagactcttcccctcacactcctgttccaggttactcttctccaatatgatgggggtttgctttcattgtttctgtattttttgtatttttatgggtaagctgagccccttttacctggtcttgagtcaggcaggggccacacagagaagaggaattcctccccaggggccagcagtccacggatcaaggcatcagggacctgagcagtaggttctgttcctatgcctggacccaggaggcccatgagcctccagcagtcagtatggagcagccaccaggggggcagcaaagagtcacctgggaaagccacctcgggatggggtggacctgggcatcagggagatgctgacatgcagggagggtcagtgaccacgacctgacacctggagggaaaataggtccttctttttctagagtgttgtccttgacactgatgtaaaaattctagcatcaaattttatcttcagcttttgtagatgctcctatttccctgacaaaggtccaggcacttgacttccccacacatcctctcctcacacacccagttgtgctaaaatgctgtccctgtcatgcacagtgtccttcctgaggtgacacgtgtccccctccctgccctttgctctgggagcccctgtcctgtagacacagcagcttcttcttccctggctgctccccatctccactgtccctgggctttcccatctgtctcctgggaaagctgccaaatcacaggtctcaatttccttgtgaggcacaaaatagttgctcattaaccttctgttgacttaattaagtttttaattccttgatttgttttccccagcaactgaagacaacttagtcataataaacattcacttccaggggtcttgcagtttgctgacccctctcattctctcatggagcaaacattttcttgacctccttatctgtcattggtcctcacagcaccctggggacactgaggcacagcatgtacgacctgccctggagctcacagccaacgaggaaacttaccgcatcccatggatcttccaacactccatgtgcacttggcaaccaagaaattttattcttctctagcactgaggagctgtgccctggggtggggtctgtacctatccaaggcacatgctgtcacctgtagagtgtggatagagggtccttgcattaggttctggaaagtgtcttcaaaaacggatttaggcctacacccaaaatctcctctctggcacaaattattcatgatcaggatacatctagaggcctagaccaaaattcaccacctccctcctgagccagaatggaatggaggaggggactggggaccccagataatttccccatcaccactgtgactctatggccacctcctgcaacagttagggataatcacataggaagggcttcatgtatcctaggaaaaacacccaaagtcatttatgagctctaccatgaccaagtgagcccaggagtcgggttgagcacagcgtggtgtggagatatctgcagagaccgtggaaccagtttgtaaaggagatcctgtaggctgagggtgagagtgcaaggccactcctccccctctctgcatcctttggggctaagcccttctctggaaaccacaaagctcctccagtagcagcccttgactctgctgatttgcatcacaggctgctctcttcagcaaggggataagagagggctggaaggaacctgcccagcctgggcctcaggaagcagcatcgggggtgccgcagccatggcctggaccgctctccttctgagcctccttgctcactttacaggtgctgcccccagtgtcccagccacctacccagctccaaggctctgggtccagcctggcctgacagtgatctcagcagggccctgcctgtggtgtgcaggatgctcatgatcctgctgcagggggaggggctgctggaggtgaaatccccccacactgttcttctgtgctcatggtcccctgaggacacttctattcctgaaactcaggccaggcaggtgggaaggcattgttgggttgagcctctcagtttcaagtctattctattctctccccttttcttgcaggttctgtggcctcctatgagctgactcagccactctcagtgtcagtggccctgggacagacggccaggattacctgtgggggaaacaacattggaagtaaaaatgtgcactggtaccagcagaagccaggccaggcccctgtgctggtcatctatagggatagcaaccggccctctgggatccctgagcgattctctggctccaactcggggaacacggccaccctgaccatcagcagagcccaagccggggatgaggctgactattactgtcaggtgtgggacagcagcactgcacacagtaacacaggcagatgaagaagtgagacacaaaccctttcgccatctatgtcaccctctttctctaattcaaggaggactatgaacaaagccttacgcagatctggttaaattctctttaatctctgcccccagcctgtccctccctccagtccttcaggcggggtctgcagaaagtgcatcagtagttcatttagggtgatgtgatcaggatggactggtgttttggtgactcagctgtgacttgggaaaatagggcctgcatggaagatcagactgaggtagacatccacagttgtctctggatttccataggtggtgacaggccagtccttgccccaaatgtcctagatcagtccccagaactgcccagctcaggctcctgtggtagcctgtcattctttagagaaacaccaatggagtagacactgtgggatctgcccagatcccctgttctgagcttacccactaagcactactgggagcttctggcaggtcagagctgtgtcctcactggaaagtgctgttcggtgcagaaaacagactcctccaggtctatgccctttctcagtgaggttagatttcatgactgcctgaggccgagttctcgactctgcctcaatataggaagacctgaaaatcctcccagctccacagctctctgtaggaaagacttgagacctcaatgagggtcagggtctcctgcccagggttgcctccctcacctcctttcacatcctctgtgcatgcaattcctcatctcagagtctgcttccagggaacccaattaagatcaccagccatccccaacatgggccatgtgggacttcaggaggccactgtatgctggaaagcacctgtttattcctaaattagcactgtgagtatccacacgcccaatgagatctgagtgtttcttgcatttgcatggaatgagaagggagcctgactcgccaggtgctctggggtctaagggagagttggagtcagatctccctgcagggaaacctggggcaggaggagcagccttaccccatgcagggaccacagatgcacccacagggtgagcttaagtatggacactgcctacctccaccctccacatcctgtgtaaaaaatcattctttccacccctcctccagcctatcaaagttgacacttaaaaagccaccacaacccacccttgtcaacaggaaacccattcacatctccatcagccacacaatctccacataaagattcttcaaaaaataataacaatagccatgcaaagtatatgatatatatcataaataattgtacttagattatatatgaaaatgatactctttttgatatgctaggtaaataaaatacattatttaaactcattgacttcttctctttgtatttataacatgatgactagacagtgggattcccatgaggctcacatcacattgtgattgaacaaggctggtctgcagggcttcaggttacaggggctgtggagtgacctggtgcaggaagccccgtctccatccataggacatcagtgtgaacccagggagaggcgctggtataagagagatgagaacacaggtgtgaaccacctgcttgtgcaggggactgagccttcactttgagccaaataagttttctttcccaagttcgatcctgaacaagagggctttctggacttctttttgttttcaggtttgtgccccttcaggtttggggctgtctggagtcccagccaggggacagtgaggaaatccagcagtctcacactgactctgttgtatttcatctgctggggccatcccaaactgctgcgtaccatttcctttcctggtgctcaaatagctgctccatgcacttgtcatggttttatagctcaatctagatgggaagacaggatagtgtatgttacaatatttaaatagaacctgaatcccttaatagttattttaatatggaacattaaaagagttgcatcataggcaatggggaaagatgaagaaagattaaacgcatttggaggaaaaactaaaaatgtctttattgaatgtctgtgtgtcttcagtgacgaagggttgagagaggtcagctttaggttgtcctgaggatgtgctcagatgggggaaagtaagaaagcaggaaacgtgcatctctgtgacctgacacataaatcacagtaaaatggaagtaaatctttcaataaacctttcaagataacatcactctggtgcacatagaaaggcctgttagcaaactttcccttttccctgctggctcatatccccatggatcacctgtatgcagaacggactctgtggtctccatttatcaggctgagaaccagaggctgggaaggacaagtcacctgctcatgagtgggaggggcaggattgggagcagcggactcaggctcaggactgtggccctggttggtgctccttgttcccttcacagggtcccacccacatgtgcccgtgtggatgtgggtgcactgcctggggtggctgatgtgctccagggatttgatggtgcagatgcttcaggacaaagcatgggagtggggatgggacgagctgccgctgggcagaccaaggaccaacgccacccagcagaggcttccagtggggttgggcagccccatttcctgagaatagagagaacctggcaatgagtgccagaaagaagttacttcgaggtgtgcccaggcctggagggtcacagagacacaggcaccacacagcagagacactgaaggccaagagctcactcaggtgaagggcttcaacagatttttctctcctgagcaaatcacgtgcaaagaaatcaacttcctgtcatcagaatagacaatcaggactttagtctccttggctgagccccgctgtcaagggaagcagaagtctctaagcccaggcccaagtgagggtggggtgagaagaggagctcaggatgcagatttgcatggaggtcccgcccttctctgaggcagagggataagacagggctgggggcaggcccagtgctggggtctcaggaggcagcgctctcaggacgtcaccaccatggcctgggctctgctcctcctcaccctcctcactcagggcacaggtgatgcctccagggaaggggccacagggacctctgggctgatccttggtctcctgctcctcaggctcacctgggcccagcactgactcactagactgtgtttctccctttccagggtcctgggcccagtctgccctgactcagcctccctccgcgtccgggtctcctggacagtcagtcaccatctcctgcactggaaccagcagtgacgttggtggttataactatgtctcctggtaccaacagcacccaggcaaagcccccaaactcatgatttatgaggtcagtaagcggccctcaggggtccctgatcgcttctctggctccaagtctggcaacacggcctccctgaccgtctctgggctccaggctgaggatgaggctgattattactgcagctcatatgcaggcagcaacaatttccacagtgttttaagtcaatgaggaagtaagatcaaaacctgccctgggctctcaggccccttcttgctctgcagatgcttcctcacgctgtataagggtttcctgcaggatggccttgacaattctcctctctcagctcctctcctttcccaccatgaggtctaaaaggaaacctgctcgtgatttctcgttcaggactgtggcaacttccttttgcttgtgtgctctggtcccttaacgtgcaactattcctagctcttcaatgcagggacgtagggacaaggagtttactgcttggtgcagtccctcctgttttcaggaacatcctcattctaaatgcatcccccatctgccacactatgcagatcaatctggacagaagccatcagggggatggcttccagtttccaggaattgcatcttgttccactctgtgtccaccacgctctaatgaagatggccctcctagctggtctattcctctgcacctgggtcctgaagcagtgaccactttaagaagacttgaagatgtttttgagggattaagaacaaagaggatgctgctgtttttctttttattgctcctgctctttgccgaaattcctcaggttgctgagctggggagattttgagtgacaggctcagtgctctcgcagaattctcctcccctcacatcgctgaggccctgtcctggaaactcctcacaagtggacggtcttcccataggatgggggattccaaaatggctccacaggaaagagttaacctgagtccacctcccttcctcatggacatcgagcatttctaattttcatggctgtcaatacttttgtacctggaatccctaataatctaatggtgagaattgatttagaacacattcggacattagctgggtccaatatttaaattttctgagccagttgttaaatacagctattatcatatatagtttaggctccttaaacttcgattatacagattatatttaaaacaaagtaactagtttactatatatatttacaaagtaactactatataacatcatgttgtgtacctgaaatataaacactaaaatttatttcaaaaaccaaagtgtattgtctattgatgcataaaaaaacactcacaaaacttagcacactaagagaacacatgtctgtgaccttgtgacttggatgcacctagaattgggagtagcttagtttggtcattctcgctcctggttaatcacgaggttgcagccaagctgtcaggccaggctgcattcaggctacatctgccaaagaggttaggaactgtggaagcctccctctggctgtggaagcctccctctggctgtggaagcctccctctggctgggagacttccgcagttcctaacctctttggcagacgtagatcatctcaaggataaaggagagagtggagtgaaggcccctgtccttgtcctccatgtaaaaggccatcccatgcatgcactattttttattctttgctgagacatcctaggcatagagcactgccccattcattcaaaggttgtagagtattctatggtagaattttagccaactcacttttaatggttattatcactattttgatcttataaataacactgcagcgaacatccttatgtagactcctttgattttatatgtagacatgaccatagaataaatttctagaagtcaaattgctgagtcaaaaggatgtgtgcttgtaattttcactcactgtcctcagattctcctctagaggggttatctacaaattcgcaatgtcagccataaatattcgaacagagtacactggggaaagtttaaatgtttttcaacctagcagatttaaaaatgttatctttttttagttttgatttctcctgttctgcttgaagttgagcattttctctaatacttcagtgctatttatttttataatttggtaaacattttcttaaatgtccagataagaaggattttggtctgtggttcccaagagtcaactttgaggatattctgtaggtatttttagcaccatttatagtgtaaccatttaaacctataaaaaccactctcagctctggggccatggaaaaacaggtggcaggacagggatggcccacaggatgtggtttaacggtccctgatttgtagggtaatttgaagtttgagaattccaccgcatatgttctaggtggagatctctatttgaaggatactgtattttacctcctatagtggcctgaggcttttggataagaacatacttgtatcatctatttaattggatcttgggtcttcccaggacagccctgtgtcacagtctcatgtttttcatctcatccatttgctctgagttttcagaaagctttagtatatcagaaatagactgaccctaggtggaaaatcagaggtaccgggagcagcaaatggtcagggaagcttgcaccaactctggaataaaccagtacaggctcagagaaaaacatcataaaatcagcattgtagctgaaaccaaaaacatgcatgatctttgaagttctggggattataaataaataaatgaagtttaaggtttaaatgtgttgcaaatttacataaagcatgtagattttaaaactcagaatgcagcaatgaaatatggaagcttgagattttaagctgttaaggccctacaacaaattgccaggaacagaacaggaacttgatagtcataatgtcttatgctggaaattatcattttctctaaatgaaatttttttcccttttttcttagacataaggaaacatctcattgaacacccttcttttccactgtcaaacacccttacccagaaaggaactgtaacattaagtaggaaacaactgctttttttcataactattgagagatttctttatttgcacatcaaaatgttgattgtcaatgctaaaattggaattagtagtttaatatgcacacaagagattaattttgtttggattatcccatttctgtctattatttgtcttagttaactcagacatattctgcttttggtattttttgttttattttctttgccaactacatgtaaaccaaaaataaaattctaatgctcccccaacaaccccaccatctgagtggactctcttctcttggtgggggcactccaaagttaatctgaaagactggttcaggccatggcagaaaaggggtgtcagacatgtctcattaagcccttttcctttttggaattcaggaaaagccaacctgcacttaacatcaatacaaatcttaagtctgataagaaacatttacaatctattctctctgaagcctgctacctggaggcttcctctgcatgataaaactttggtctccacaacttattataacccagacattcttttctattaatactttcaaccaactgctatcagaaaaatttaaaatctatctataatccagaaggccccacaaccctgcctcccatcaccctcttgttttgacttatcctgcctttctggactgaaccaatgtatatcttgaatgtatataattgatatatcttgtctccctaaaatatataaaaccaagctgtgccccaacctccttgagcacaagctctcagggtctcctgagggttgtgttcaccagtcatggtcactgatacttggctcaggataaatatcttaaaatattttacacagtttgactctttgtcaacatatggctcttttcaaaacaccatttgacacccagacataacccgctgctaatgattacaaaattcaattttattagcatttaaattattactttaaattatttcaagaatgcatggatgtgatttcccccacatctaactcacaaatgttgctgatgctgacttgctcttttctttcagtcttagcaaataaagagggagtttacttttcttgataccagaagataacaggagaaagtaggtgaaactcccgaaagctgttatcgtttccaccctcaggatgaatcacacaaggagtcacctgcacttcatttggatgataaataaatgagatggatcttagagttggtgctgatctagtcaatgatttgggatgttgggctgaggtgaatgtgtttcacaggtgagaaagacatgagttttagagtccacagtgtggagggttattggctgaagtgtgcccgagaattcatacaatgaagctctaatcacagtgcatgaatgaattggaacataggtctttaatggggtgattaagtgaaaatgaagccagtaggatgggttcttttccatctgacaggtgtcctctgaagatgaagaaatttgagcacacagaaatgagacaccatagatgagcatgcagaggaaagatcacgtgaggacacagaagaagggagtgatttgcaagccaaggagatgttacagtagataactaggcagacgtgacagggcaggagaccccctgccccaggaatgtcacgcaagcatcagatgatggtcaggtagttgttaaactgtctctgtgaattaataattagtcacagccggcaccaaggaaaggcggtctcccaatagatagaaaatacctgaagctggtgatcagcagctttctgataagatctcaggccttgggtgagtgggctcaagcaggcaaactaaaaggcaaaacagaggccaggcatggtggctcacccctgtaatcccagcactttgggaggccgaggtgggccaatcacttgaggtcaggagctctagaccagcctgaccaacatggtgaaaccctgtctctactaaaaatgcaaaaattagccaggtgtggtggtgcatgcctataatcccagctactcagaaggctgagccaggagaatcacttgaacctgggagatggaggctgcagtgagccgagattgcatcactgcaccccagcccaggtgacagagcaagggtccttcaaaaaaaaaaatgcaaaatagcagagtttaacctggatctgagactcccatgctgcccttccctccagccctacaggcaggctctgcagagagtgaatcaccagtaaatacacaaacaaatatgattacgttccttttgtttaagaagtagaggaatgattgaatatattaagtgaaaataaggaataccaacacaaagaaaaatttaactgtaagtatggttaaaaatacactgggtgagatagacaagttagatgtcgcaaaacaagagattagcaaactgtatagtgtaacactagaaactattcaaaatgaaacacatagcaaaaaataacgataaaaataaacagcatcaatgagatgtaggagaacttcagacaggctaatatacgtgtaattgaagtcctcagaatagaagatggggtaagaatgaaaagaaaaaatatttgaatgaataatgacaaaatatgttccacatttggtgaaaaccataaactgatataacccagaagctcgataaaacttaagcataggaaacacaaagacaacaactccaaaacacatcataatcaaattaataaaatctagtgatgaaaagtagtcatttaggacaaaactacaaagagcagatttctcattaggagcaatgcaagcaagaagatagtgaagcaatgtcttgaaaataataacatgcaaaatccaacaaccttgaattctttatccaccagaaacatctttcaaaactggaggcaaaataagactttttcagacatgtgaaatcctacagaattgatcaccattagactctcgctattagaaatgataaaggacacccctaaacagaaagaaaataatcctacattgaaatgtggtttgacacaaagaaatgaaaaatcagatatggtagctacctggatcaattagaaacctctgtattatgtaatgtctataaaaagaacagtaatgtctataaagagaactgttcagagaaaaattaataagaatacactatgatttgtaataaaaataaaagcaaactatatgacaaagcagaaaagcgaaggtgggtgaagaacatgtaataatggttttgtactatatgtgaatatataatagcacctgaaggtagattttggtaagttatgtatttactgtataccctaaaacaaccattaaaataaaaccctcaacaaaaaagaaatatggctagtacgctatattagacttgtccaccaaaaattaataggatatgtatggatatgaatatatatgtataatgtatctatatggtgagagagacagacagaaacttattttaagaagctggttcatacaatagtggtggctgatggacaaaatctgttgggcaggctataggctggaaatttaggtaagagttgatattgccgtcctgagttcaaattctgcaagaagctaatgtttccccaagacagcatcagctgttattatgcacactggctccaaatcgaggaaagtgtcccccctgaccattagcagagctcatgccaagaacaaggctgatcattaacatcaatcactgggaaacttcagtatttattctaaaaaccttgaactcattaatgagactcacacacattgtggaaagtagtattgatacaggagacagaaattatttaggcagatagtgagggtgacagggtcctcagcagagcttctcatctaacaaaaagcagccctaaaaatcatttcttttataacaaagagcagcctgaaaaaatcgtgctgcaaacatagataagcaagctggaagcttgcatggggcaatgccagcagctatgccaatagaaaagtactacctgggggtcagccatgtccaacatggaggctccatcttccctttttttgtcaccatgtgtatagcaatagagaaatgggcaacatggagcagctcaggcagataacccacctgcgtaataacagattagggcagggttggccagaaatgtgcaccctatgcaaatggtacacctagtcctaatcagtttttcatgccctgtgcaagtagcacacctggtctaaccagtctttgacacccaccttatgtagatcagatactgcctcctcaccagctcatctataaaattccctacatttcactgcagatccggcaacccatttttctgggtcccctctctgcagcagagagctattatctttctttcacctattaaacttctgctgtcaacctcatttgttgtcagatcatgtcctagttttccatggccctgagacaatgaactttgagtattcaccccagacaatgaggctatttcaatatgcttatacaaagtctactggtttgaatatttatcacatttgaaaaatatcttcatgacaatgtctacactggtgcttaacaaaatcaacctggtaccatgtcttagccaatctgacacttaaaattcaccaccacttaagccaggagctaaagaaaaccaatttttaaaaataaatttcaaaagagagaaaaaggaaagaggaacaatgaacatataagacaaatagaaaaaaagagcaagatggtatattttaacaaagtatattcctaatcacattaactataaatggtctaaataccacaattaaaaggcaggtattatcatctatattctaaaggagttcaggtagggttggtatgctttcttccataaaaatgtgataccagtgaagctatttgggtataggtgggcttttcttagcacggagattttaaattgctactttaatatctttaagtgtcatagacttattcagattttctatgtattcatgagtcaattttcataatttatgtctttccagaaattttacttcatttatctataattttggcatttactgttcataatattccctataaccattctcacccttttagtgtctatagtgatgtcattattttagccatggttttggcaacttgtgtttctttttcttttttttatcatggtcactttacctaaagataaaaatctattgattttattaatctttttgaagagccaagtgttttttttttttttttttgaggttttctattgttttcctattttctatttcatgaatgtttggctgtgatccctattattaccctctattcacttagaatttgaatgttcaccttttttaggtttatgaggtagaagcttagattattttctttaattctttcttctttccaatactaagcatttaatgccatagtttttcttcaaagcagacttagctgcattccttaaattttaatatgttgtgtttttatgtttaaaaaggttcagtatcttctaatttatgttgtgatttttctttgattcatggattacttaacagtctgttctttcactttcaaataattgaagatttcctatggttcttccggtattaattcaagttaattagttaattctgcattaaattatatcttctatgattttcatcctttcaaatttatcaatatttgatttatagcctaaactatgaactatcatgaaaaatgttccatatgtatttgaaaagataacatgtattctgctgttgtgggtgcagttttctacaaatttattataattaagataacttggcaaatggttcaaatctatattcttactagatttctgtgtagttattttgtagatctctgagacagagctattgaaatgaacaacacaaactgtagaatttcccaatgattattttgagagagatcatttttaaaatcatggatctaaataatttattctcctcacaaaatgtcttctatgatttccaaatactaatcaagggaagaaggcagagttaaactcacacttgtagataccacgggaacagtgagtgatcatgtgatgtgcctccagaggttaggctaatgtagttagagtggtttatatttatttatttatttatttatttatttatttatttatttagacagagtctcgctctgtcacccaggctggagtgcagtggcgctatctcggctcactgcaagctccgcctcccaggttcatgccattctcctgcctcagcctcctgagtagctgggactacaggcacccgccaccacgcccagctaattttttgtattttttagtagagacggggtttcactgttagccaggatggtctcgatctcctgatctcgtgatccgcccacctgggcctcccaaagtgctgggattacaggcgtgagccaccgcacccggctggttttttttttttttttaaacacacagttgggctaaaatatccatgaaaaaatttgaagcatgtaccttgaataaaatatgaaaatcaaaaaagttaattgcacacgtacaacattgttaccacggtgcctgccgcatgggaaatgaacaacaagtgttattaattcaattctattttcttacacattcaatgaatatgtattgaaacaaattcactgaatggtcccagatactgaataggtccttgagatgtactggcaaacaagacaaaaaaaaaaatacatgttctccgggtggcctcatggaagatggtggagtaagaagctccaagaaatggtccctcctgtgatataactattgaagtggcaagaaccatcagcattcactctaataaaactatggtatctcatcccatatttgcagcatccagggaagagctgaagaagaaagagacaggcttaaggaagtctctgtcaggtagatctctgaccacagagataactgaacagaaatttcgtggatcactctgacaagaaaggtagtccttgcgaaaatattcaggaaaagtcacaacacaaataaacaactgcacccctcagatgaacaactgcacaatatcagccaaggggcataatctgataatctgatcctgggagttaacaacatcacaatattcaaaatactcagatctcaacaaaaatttgcacagcatacaaagtcacaagagagcacgactcattcccaggaaaataatcgactgaaaatcttccttaagaagcattcatttgctcccatcttctcccttggttatataacacgtccttccacatatacttgattagagcttgtgccccacaaacatgcctggcatgtacattagtgacttctgagagggaggtgggggcaggaaacagtccctctggatacatttcgcatcacatgaaccagtgaacacatctctgcaaggtcctgcattctaataaacaagatttttctgtttaaaagaaaacttaagtctttcagaaaactgcatttcaaaagggaaccttgtctctgctgcttgggctgcagtgaggacagatttactaagtgctggttgctgtgttttgtcttctagtgtgggtacacacatctagaaaagttttaaagaagattggggaacccccacccagcactggtgggactttgagtttgctacggttgtgaacagaacatggaacagaggacaaggtggcccctcctgaagatgagagttttgcttcttgctggaagtccctggactcctggagtgttctcaggggacctcttaacaggatctcaagggaaagaatccagggtactggatccacacaatcaacctcacggatttctgagtaggtcattaacctatcatgcctttagcgttatctcaaattatacatggtatcatctcaactaatgtctaaaacaatatacggcatagatatctaaagaactagtggtacatggaggatggctttctacctctgagccctagaagggactgtgggccttggtttggggactctaatgactctaagtcccctggtagtgctcaagtgcaaagggaatgactgacgctttttttgaggccccttctattgtgtaaaatttattctgtacttgtgacacccacctggtccttcttctgaacatgggaaattgccaagatgaagtctccaggctaacggctcagacaggagctcagataaacatgctgggaagtggagagcaaattgacattcaaagctcctcccaacaagcttcaagaagagggtaacacaagaagtccttgtaaccaggttccacggggcagcctcaagcagagctcttggaagtccctcccaccacggtctgggtctccttctacctcctgcccttcattttctccacaggtcagaacatccagggaattcagggaaaccctttcactgctatttctccacaagctccaatcctcaggggcattctttccagttctcccgagcattcggcatcattcatgaaattctatgtttccaggtctctgtgctctggctgtgctaactcagcccccgtctgcatctgcctcactgggagcctcagtcaagctcacctgcaccctgagcagtgagcacagtacctacatcatcaaatggtatcaacagagaccagagaggtccccctagtatataatgaagtttcacagcgatggcagacacagaaaggaggacaggatccccaattgcttctcgggctccagctctggggctgactgctccctcaccatgtccaacctccagtctgaggacgaggctgagtatcactatggagagagccacaagattgatggccaggatgggtgagccacacacagtgacacaaagggaaagtgaggccaaaaccccccacctcccctttctcctcagggactcagagtcagcagtcacatgtccccttccaagtccctgagacttctgactctcctcctgcagagacacccctaggcagaggcagatgcaggccatgatttaggccattttgacaactcatcattctgtctcctcaacaccagtctgtggggaccatactaggagagaccagagcagcccaggcagaaggaccctgagagagtggccaggctgagatgaccgtgtcccagtgtctcactgtgccctgtgctcccttaccgggctctgccccaggaaaggacatggatcttgacctgtcaccccccatttatgagagttcaatgtgtgtgcatcctcgttagcacttgatattgtcagtttttccttaaagtctttcagatagagctgtagcgatatctaattatgtttttaacttttatttctttaatgacttattatgctaagtatcttttcaggtacttatctgtcctttgtatgtcttctttggtgaaatatttaatcaaatctttgcatttttaaaattcaggtttctcaggttcacatttcctcatgtatttgtatgagtttatatgcatgcatgtgtgtctatgcattccattctgtgtgatttcccaacatgtatcagcacaggtatccaccactacaatcaagacacaaaccaggtccatcacaacatttcctggtgtttccctttgataatatctacctcctcccacccagttccctcccttgcccaaccctggcaaccactgatttggttccctattcctaaaattttgtcttgcaaaaacgtgatacaaatacaaccctattgtagtagacagactttggggttggaattttttacttagcatcattccctataaagtcattggaaaggtgtgtgtatcaatagtcagttcctttcaattgctgagcagtatctcttggtattagtttaacaaaacctgatgaattactcacccaccgaagggtatctggattgttttcagtttggagctactacacctgagggtgctacgaacatcagtttgtatgtttcttgtgaacataagtattcagttctttgaaatgaaggtccaatattataattgctgtgtcatacactaattaggtctttagttttctgagaagctgacaaactgttccctgaagtgaatgtaacatttttttctggccagtaatgaaggaatgatcaaatttctctgcttctttgggaattgtgtgtttttactctttttttaggtaactattgtgataggtgtgtagtgatattccattttttaaaatttcatgtctctgatcgttaatgatgatcaccttgtcctgtgcttatttgccatctgtatgtcctctttgatcacgtttgtgccctttgcacattttctaattagattgtcttttgttttgctcttaactggtattcagtgttgggtgttttgtttttttgagacaggattttactttgtcattcagcctggagtggagtgatgcaatcacagctcactgtagcttggactttcctgactcaagcaatcctcttgcctcagcctcccaagtagctgggacaacacgcacacacactgcctcactaatcgtttacagaattttctttgtagagacaagatctccctatttgcccaggctggccacgaactccttaggctcacgcaatcctccctgctcaacctcccaaggtgttagaattacaagcatgagccaatgcactcggccagttttcactgttctttatgtattttttatactagtcatttactggatatgtgattggcaaatacttaatgccagtctgtagcttctgttcacatcctctcaagagagatttttgcaaagcaaaaattgatggttttgttaaggttcaatttatcagtctttcatttcatgacttgtgtacttggtgaagtctaagaattctttgcatagacatagatcttgaagattttctccttttttttttctttttttttgacagagtctcgctgtcgcccaggctggagtgcagtggcgtgatctctgctcactgcaagctccacctcccgagttcacaccattctcctgcctcagcctcctgggtagctgggaccacaggcacccgctaccacactcggctaatttttttgtatttttagtagagacagggtttcacagtattagccaggatggtctcgatctcctgacctcatgatctgcccccttcgacctctcaaagtgttggtattacaggcgtgagccaccgcacctagccgattttctcccatttttaatataaaaataatagtatcgctgggcacggtggctcacgcctgtaatcccaacacgttgggaggccaaggtgggcagatcacaaggtcaggagattgagaccatcctgacacggtgaaaccccgtctctactaaaaatacaaaaaattagccgggcatgatggcaggtgcctttagtcccagctacttgggaggctgaggcaggagaatggcgtgaacccgggaggcagcgattgcagtgagccgagatcgcgtcactgcactccagcctgggtgacagagcgagactccgtctcaaaaaaaaaaaaaaaaaaaacagataaataaaaaataaatctgagagatggctgagcaatttcactgagtttcatcatggaattctggcctcccaaacaccagcatggcccctgttcctacaatctcctgcttcaagatcaacccaaccctgctacccagaccagatgctagatggtcaagacagggctgtgagagctaaagaatcttcagggtccacgatgaatttacattggagcttccttttccacggatattcacatcaatagagaagatgactgagttcttgcctacctctgtgaatacctgagacatgaactgagatgtgtgtgtgcatatggtgcgggcagcacttcctcactcaatactagggagagtgtgaggaaactggatacagacctggagatagggcacatttttacactctctattaagccctgtccttctgtgctcaccaaggagtcacccaacaaggccacaacaggaagagaagcaggtttctatgaagagacttctctttttgtgatgagggcccaggaagtccactgtctagctatgaactcagaggcagaactctgatgcatctccaccatgacctgaatccctctcctctactcacccttcctgctgtcggcacaggttctgccttccagggctcagccccataagactagggatcagcctggccctgaccttcagctcagcacagggagtgacgcagtgtgtggggctctgagaatgagaccctcatcttcagactcacctctcctgtcctatcttgtaggctcagtggcctcctctgagcggactcagttgcctgcagcgtctgtggctttgggacagagggccaggatcacctaccagggagacagcatagaatacttttatgcaaacttttgtaccagcagaagctaggacaggtccctgtgctggtaatctatggtgacagcaactggcactcagtgattcctgaacaactctctgactccatatcagagaacatggccaccctgataatcaatgggccccaggctggaaacaaggctattactgtcaatcatgagacagcactgatactcatctcacagtgacacaggcagacaggaaagtgagacacaaaccccttcccacctatgtcaccctccccctccaacctcaggaggacagtggtcagagctataagcaggtctggcccagttcactcagatttgagacccccaggctgcccttccctccagccttccaggcaggctcagcagagtgtaaattaagagtggatacacaatgaattattagaattgtatttcagtttttcaagaagtagaggaatgattgaacatgttaagtggaagtatagaataccaaaaaaggactaattgagcttgtactgctaataattacagcatctgagacattaaaaacacactggatgtgattaacaacagatgatgcaacacaaaagattagcaaactcaataatgtagcactagaaaatattcaaaatgcagcacataaagaaaaaataatgatgaaaatgaagagagtgttacagtatatttatagaaaaaatgaagagtgagttataggacaacttcaaacagcctgaggttggctgggaggggtggctcacacctgtaatcccagcactttgggaggtctcggagggagaatccttttgagactagaagctcaacaccagactagacaacataacgagacttcatctctacaaattttttttaagaaaattaactaggcatcatagcctgcagctgtagtcctacctacttaggagcctgagacaggaagattgcttgagcccagaaattcaagatggcagtgagtgaggtacgatcatgccactgcactctaacctaggacacagagcaagttcctgggtctcactctgtggttcaggctggagtgccatggtgcaattacagctcactgcagccttgacttcccaggcccaagagatcctcccagctaagcctcccaaagtttctgggactacaggcatgcatcacatgcctggttaattctttgtattttttgtagagatggggttctccctatgttgcccaggctggtcacaaactcctgggctcgagcaatcctcccgactcagccccgcaaagtgttgggattacaagcataagccacgccacctgatgtgaagaaatatttaaatacaacaacctaaagtatgtataattgacatccatggaatagaaaagatgaggtggagggtcagtagaaaatatatttgaataaataatggccaaatatgttccacatttggtgaaaaccaaaaattggtatatccaagaaggtcaacaaaactcaagcacaggaaacatgaagaaaacaactccaaaacacatcataatcaaattataaaatctagtaatgaatacccactttaaagtttaattccaagagcacatctctcattagaagtaatgcaaggcacagtggaacaatatttcgaaaatgctgaaaggaaaaacttgtgaaccttctgttatttatctaacagaaataacattcaagagcggagggtaaataaaatgttttcagacacataaaaacttacagaattgatcactatcacttttggcattagaaatggtaacagacatccatagacagaaggaaaatcatacccagttgaaaagcaaattcacacgaagaaatgaaaacttcagatagggcaatgacatggatacctatagaaacccctgtattatgttaacatctatgaaagataactgttcaaaggaaaattagtaaaaaaatcactgtgatttattgtgaaaacaaaattaaattatatgacaaacagcacaaaagcagagaggagtgaagaacatgttataatggtcttataccctgtatgaatatctaatcacacttgaagacagattttggtaagttatatatgtaccattaaccctgaagtaattattaaaataaacccttttaacaaaaaagaattatgactagtagtaacctgtattaggattctccacagaaacaatatcaatcagatatgcgtgtgtgtgtgtgtgtgtgtgtgtgtgtattgagagaaaaaagagtgaaagaaatgtattttgaggaagtggatcatatgattgtagtggctgacaaggattaaatctgttgggcatgctgaagtctggaaattcaaataagagttaatgttgcggtcatgcatgcaaatttagcaagccagcacatcaggaaatctccatatttgttctaaataccttcaactcactaatgagtcccacctacattgtgcagagcaatctgcttatacaaggtcaactaattaaaatgttcatcacatctgaaaagtatcttcatgttaactcctatactggtgtttgacaaaatcaacctggcccatatcctagcctatctgacacttaaaattaaccatcatttaagccagaaagaaaattttaaaaatatttctaaaaataaatcagaaaaggaaacaatagaaggggaaaaataacgaacatatgggatgaataaaaaatgaggagcaagaaggtatatttcagtaggattatattactaatctcattaattgtaaatggtctaaatatcacaactaaaatattgtcaaattgaaattaacagcaagactcaactatatatgctacctagaataaacctacttgaaattttagaaccacaaaaagccaaatacaaatcaacgacaatcttcccaacccctggtttcccaacaaagcattacaaaccgaattcacagggattaacacatagttaaaaaatatgtctcacttccaccaacactcttacctctcttcagcctctaatgcctagatcccagtaccagagttgcaagaaaacagggcacacaaatgttaaatcaaggttactaagggtcaccctcaagaggtaggtgaaaagagaatgagggaattgaagccacaagggtcccacttgcatggggcagctcctgcatcacaatgttgattgatacattattgatgagtttttgtccatgttcatggtggacataggtctataactttcttttcttgtcatgactttggctttggtattggagtaatgcaggcctcaaagagtaagtagaaaaatgtttcccctgctgtataatctgaagaagttcttgtaggattggtatcatttcttaattaaaaatttgatagaaatttactatttaaaactgggtgagcttttcttagcaggaagacttttaattgccaattcaataccttcaaataccatagatctatttggattttccatttcttcctgagtcagttttgatcatttatgtcttttaaggaatttttccacttaagtcatttatacttttggcattaattgcttgtaataatttccctaaccattttaacttttgtaaggttggtagtcatggcactcttttatcatggttttagtactttgtgtcctctttcatgttttcctagtcagtctacctaaaagtaaaatcaataggttgtatttatctttttgaagagccaagttttgttttttagaggctgtctattgtttttttttgctatttcattaatatttggctctgatctttcttattaacttttcttttttttgctttgaatttaaatgctcacctttagcctaaatttatgaggtacaagcttagataattcattttagatctttcttctttccaacattaagcattaaatgcaatagatttccttcaaagcactgatttaagctgtatttcttaagttttgatatgttgtctttttgtgttttaaaggttcagtatcttctaatttatgttgtgttttttctttagctcatggattacttagttgtgttctttcctgctcaaataattgaagatttcccatagttcatcaggtattaatccaatttaattaattattttggcattaaataataccttctatgatattcatccactgaaatccactaagatttgacttgtaacctagaacacagattatttcaaaatcatttaaaaatgtgctaaatgtatttaaaagcataatgggtattctgctctcatgtttgaaagtgtaatgggtattctgccattgtgggtgtagttttctacaaattcaattaggataaattggctatttgggaggctgaggcgagcaggtcatctgaggtcaggagttcaagaccagcctggccaacatggtgaaaccccgtctctactaaaaaataatacaaaacttagccaggcgcggtggcaggcaccttaatcccagctacttgggaggcagaggcaggagaatcgtttgaacccaggaggcagaggttgcagtgagcctagataaagccattgcactcaaacctgggggataagagagggacttctctcaaaaaaaaaaaaaaaaaaaaaaaaaaagataaattggctgatcattcaagtctgtatcttgattgaatttctgtatagttgttgtgtggatcaatgtcagggagctactggaatgatttaacactaattttagaatttctgattgattttttgagagaggaaattttcatgggtctaagtactttattcttctgacaaaaggccttttatgatttcccaagactaatctaggaagaaaaggcagagttcaagccacagttggtgataccatgggagcactgaatgatcatgtgaggtgcctccactggttaggtgtatgtaaatgaagattttttaaaaaactaattgggaggccgggtgcagtggctcatgcctgtaatcctagcactttgggaggctgaggcaggtggatcatgaggtcaggagatcaagaccatcctggttaacacagtgaaaccccgtctctactaaaaatacaaaaaaaaaaaattagccgggcatggtggcaggcacctgtcgtcccagctactcgggaggctgaggcaggagaatggcgtgaacccaggaggcagagcttgcagtgagccgagatcgtgccactgcactccagcctgggcgacacagtgagactccgtctcaaaaaataattaaaaaattaaaaaatacaaaacaaatctgggctaatatgtccagaaattttgagaaaatgtatgttgaataaagcatgaaaatgtaaagcaaggtgattgcatatgtataacattgctaccacaaggccaacctcatgggaaagaaacaaaaactgttagcagttcattatgtttacttacacactgaacaaacatgaattgaaaccaattcaatgaactgtcccagatactgtttaggtacttgagatgtattggtgaacaaaagagacaaaagtacctgatctcacagtggcattatgaaagatgatggagtaggaaattccaggaaatggtcctttctgtgaaataactactgaagggtaagaaccatcagaattaaccataataaaatgaggaaatctagtcccacattcgcagcattgaggcaagtactgatgaagaaagaaacaggcataagaaaatctctgtcaggttaatttttgcccatagaagtaactgaacagaaactttatggatcactctgataacaaagtccttgcaaaattattttggaagagtcaactacacaaacgaataactgcacccttgagcagcaacatcagccaagaaggagtagggagacaatctgattttgagagttacaacatcacacattcaaaatacacagatttcaacaaaaacttaaaaagcagacaaagttaaaaggaagcatgacccatttacaggaaaaagtttaatgaactgaatgtactcacaaggaagcaaaggcattggacaaatgacacaaatacttcaaataaccatttacatatgttcaaaaattcaagaaaaccatgcgagtaacaaccaaacaaaactggaagaataatgttagaacaagtgaggactatcaataaagaaaaagaagttataataaaagaacccaagcagattttctagaactgagaagttcaatagctaaaatcaaaatttcatcagataagttcagcagcagtttgagcaggcagaaaaataatcagtaaacttaaagatacattgttgtaattacacagaatgagcataaattttaaaagaataaataaaatgagcagagcctaagagatacatgggacatcatcaagcatatcaatatacgcattgtgggagactcagaaggaagagaaaaaagaaagtataaaatacatgtaaaaataatggctagaaacttccaaaattgatgaaagatatgaatctatactttcaaggagctcagtggccttcatcaggttaacctgacacagactcacagtgaggcacaatatgctcaaaccatcgaaaaccaaatacaaaagaaaaatattgaaagcagcaagagaaagagactcatcacaaacagtagattctcatgaaattaacatttggtctttgatcagaaacaaaacagtccaaaaggcagcacaataatctataaagtgatttataaaaatatattatctaccaattctgcatttagtcaaacaaatcttctaaaataaaaaataaaataagataatcatagataagcaaagtttagtagacctggtagatctgccctaccagaaacactacaggaagtccttaagtctgagaaaagacactacataatttgaatacatgtgaagaattaaagatctcttttaaatataaagctagtgctgttgtattgttggtatggagctgctgtgttttccatgttatttatgagatatatggaaaaaaatcaataattataaagccatgtacataggcacaaaatgtttaaagatgttatttgtgacattaacaaggtctaaaaggagaggaaatggaactggataggaacagaattaatggatattattgagactaagttcgtagcaattctaacaattttaaaacattaatcgttactccaatgataactagtaaaaactaaattgagtgtataagggaaagaaaatgaagaaggaatccaaatggacccagaaaaaaattaatagaacacatgggaaacaattattggggtaatttaggaacaacaacaacaaaagataaaagatatgtagaaaacaaacagcaaaatgacagactttctttgttatcagtgattactttaaatataaatggattagattcaccacttgaagcaaaataacaaaatgaaatttttaaaagtaaaaaaaaaaaatagaatccatgatctatctacatggtgtttatggagaaccaatttagacccaaagacacaaataggttgagtaaatagtaacaaaagaactggtgtggctgtcgtgacatgatgcaatattgacgttaagtgaattatagttgtaagtgagaaaaaagggtattccttattgataaaatggtcaattaatcaagaagatataatagttatacacacgtatgcaccaagcaatagcacttcaaaatatgtgaaggaagacacatttaaaataaaagctagagagatctataatataaattggagacttcagtaccccactttaaaaaagaatagaacatatgaacaaaagattaatagaaaatgcagctattgaacactataatccagctagacctaacagatatatacaaaatactgcacaaaacaaaagcagaatacacatctactcaagagcacatggaacattctccagaatggacgctattttaggccttaaaacaattctcaacagttttttaaaacttgaagtcatacagggagtcatctaaaaccaccaggaaacgaagtttgggtaggggaggaacaatatttccttctactcaacttagatttattggccagcagtccctatcacacaagacagattaaaaaataaactcatgcacatttattaaatataatttttacttggcatgggagctttaataaggaaatgaaaactcagagaaatggctgaacctgaggactttacatttaggtatgatgaggagaatacaggtgtggagaaatatgactaagaatgaagtaaatgcagtaaatgggggaaagagcaaggcctgtgttcattcttctcagcacaccttcattttagaggaaacaatgctctcttttcctcttctttctaatcaacaactcaactttacagctcatggaacaagaaagagaaaagcaaacttaaaccaaagtccacagaaggaaagaaataagaatcattagaccagagattaaagaaatagatgagaaaaaaaactataaagaatataaatggcataaaaagttcctacttggataagaagaagaaaattaacaagctgttaggcaaaccaactaaaaccataagagagaagacacaaataacaaaaataagaaatttgggataatacaaccaacgttatgggaattaaaatgattataagagaacaccataagcaactgtatgtcaaatctagaagaaattgacaaattcatagaaaaatacaaattaccaatctaactgaagaagaaataaaaaatcagcataagaaatagattaagtcggcaattgacaatttctctaaaaagaaaagcccagagccagatgtcctcactggtaattctactagagatttaaggaggaagtaataccaatcatactcaatctcttccaaaaatagatgaggagggaacactgcctagcacattctagaggccagcattagcctcgtagcaaaaacaaacaaggatactataatacagaaaactattggctaatactcctgaagaataagcatctaaaattcctaaattaaataagagaaaaccaagtctaactacacattaaagagaacacatggaatgaaaaagcgagatttatcccagaattgcaaggatggttctacataagcaaatgaatcaacgtaataaacaatatcaatagagtgacaagaaaaagcatatgatctcagaagatgcagaaaaagcatttgacaaagttcatccactttcaagacaaaaacacttagcaaactaggaacagaaggaaacctgcacaaattgattaaagaagggcctttatcaaaatccacagtgaatctcacagtaaatggtgaaagagtgaaagcctccccacaaagatcagaagcaaaacaaggactcctgctttcacagctgctattcaacattgtccaagaagtcttaaatttcattaaaacaaaaaaggctagtgctacctcccaccacaagcatggatcagcgttaggaaattaaaataatggtaatagaaaaattataatgacagtgatgatggtgatggttttttaagtacacaactgaggtttagtggcagaaatccggtacttccaattacagtgcagctgtgcttattggggtgacggaatcaatctcgttttcagtatacatgggaagcaggagtacatgtagggtacaactgcatttctctggaactgtttttcacagaagagctacagtttatcctgcactctccattctgtgatcaaaaaccatgaaacagagaaaagcacttcaacctgagactcagtcacaagaactgcacctgccccaccttcccgcaactatatatgccacctctctgtgctgaaccatgaaggccagaggggttcacatgtggcacagacggaggctggactccctggtccgcaccctcccaggtgacgggtgctctgggatcacctggagaaggcaagtgcctgggctctgtcttttccaccagcagagggcagcagagctgcagccagaagagaggctggggctgcccaggaggagcctatgaaggaggccagcctttgtggggggtggtcaacaggtgttcaagggatcagtcctcactttggaagtttggtatagtccctcctgtcacctggggctgcagtgttcatattctgagggtcagacacacagcatcacccaggatactgacaggggcccaggcacagtgacggcctcagctgggaaacacaactggaggcacctgggccctggtgtcagcctgggcagctcccatagggctaggatttcctaagagacgctccgaggtcaaggtgctctaggagggggaacagtgtgaggggacagggctcccggggctcaagcccttcacccaggatggctgcctgagcctcctgccattctaagggtctcattcctccgtgtccagcagcatcctggggagctgagccctctacacttggcacttccagagacaccctaccaccccctccctctccctctccttccagctccaggccgactctgactcagaggcagctcctatgctcaggggattctcaggtgggtggcgtgggacatttgggatcctggtccctggatggggcattcccagcctccttgcggagatgctctccagagggaagggaatgttcacctgcctcaggccacagctctgaccatgggactatcctgggctcagtgacaagatctgtctggctggagggaccagggatcccccaccctccagagctcatgggtgttcagagaccacgacgctggaaccctcacagagaccaaataacctaaagttagtttctcagtcaggtctgggtttctggtgctttttacacatttatatgaaacactgatgagaaaaaataaagaatcaaagagcagaggatggcaatttctagtctattagagagatggggggtgtcatacaaggagcaactcaggtgagaaacgagactagactgtgtaatgaatccacatgagttgtggctgctcaaaggaccaaaccatggtaatggaaatcaagtttaggatataagtatcctaaagacacagaaccacattctaattaaactaccaggacaggaccaagtgagtctgggaaacccagagctgacttggaggaggaggaagatgatgggttcctggcccacctgctgctgagtcaggtgtcattgatgatctctcagcacggcccagctcagccccatggccaggctcctggaaggtccacagccctgctgagcctggcctaggacacagcacaggccaggatggtataaaacagtggtcatgtggccaaactccaggaggtgactgtgatcacaggccttcaaggatggagtctgatcttctgaccagagaagcagataaagtgagctgggacccacttcttcttcctcagtctgctgtgcttcccacagagctggtttgagtgacatccttcagtgaggagtcccagaggatgccgatttgcatcaaacactcactgcctcaaacggcctgagaggcaataagagagagctggtgagcccagctgtgctgtgggctcaggaggcagagctctgggtgtctcaccatggcctggatccctctcctgctccccctcctcactctctgcacaggtgctgcccccaagcccttccttcaggctcagaacccataggatcctgagctgggcctgcccaaacatgagttcatcccaggcacaacctcagggtgggaccccctgggaacagattcatcatttacaagcctcctctcctgtcctctcttgcaagctcctatgagcttacacagccaccctcagtgtcagtgtcaccaggacaggcagccatgatcacctgctcttgagataacctcaaagatgagtatgtttactggttctggcagaagccagaccaggcccatactggtgatatatgaaggcagcaagcggccctcaggaatttctgattttctgagtccagctcagggaacatggccaccctgaccatcagcagggctcagactgaggacgaggctgactattactgtcacaggtacaatagaaacagtgatgagcccacagtgacacaggcagattaggaagtgagacacaaaccccttcccaatctgtgtcaccctctttctccagccccaggatggctgtggacaaagccatgagcagggctggtccagttcacccagttctgtgacccccaggctgctcttccctccagccctccaggcaggttgtgaagagggtgagttaagaagagatttgaggctgtgtgacaggctatcctggggtttttctggccaaggataaagctggtgaaagagagcctgaatggacgggcagacagagtggcccatgcacgtagtggcaaaagacctgggtttccacatgccagcccttcaggcaggctctgcagagagtgggttaggaggagatttgaggctgtgtggacaggctgttttggggttttctaacccaggataaagctggtgaaagagggcctggatgaaaggacacacaaagcgtatctttcatctagtggtaaaggatgtgagttccatatggtgaagcctgggtcaccccttggcccagacgtcctaggttagtcctcagcatttccctagcacttaagttcctgaatctcctggcagccttatattcaaaacggtgtaagctggagtggacgctgtggggtccacctagactccacgttaaggtcgacccacacactctcagagcctacgagtggatacccatgctgtggggcacatgtcacctgacagagtggctgaccacccctgatctcttctttctgaccacttgggtgtttggcactatgtccatcatggacactctatgggctattaacctatgattcaaagtttcttctgtgtggtgcccgtgcccaaagaccacccacaggcttctgcccatactccacttcccccatttccaagtttttctcttgcagtccctggaacacctgcccaggtcatttcccactgccctaagcccctatctgccctggcatccggccactcacctttcctcacaaaatgaatgaccaggcgccatgccctcatgcaggaaagatgtcccctctccattgtctcttaatgccaccccttagtacacccatatagtgcagctgtgctctacttcatggtgatccagttcattgctgggctactctggaaatttttgctccatcagctgagcagagggactgctacccacacaacgtaagtgtaaacccagggagcagtgctagagcaagagagatgcaaacttggctgtggaccacccacaggttactcagctctggggccctgctcctgctccatcctagctgtgtcacatctgtctcaccagggatcgctgctggggtctgcctgagcacacgacgggggaatctggcagttctggctgcttggtcactgaatgtccgatgctgtcctgtatctaccagggaacaagagcacatggggagagttgttttccaaatgaatataattctctcttgtggatgacatggaattgttccaaatcccatgggattggaatcccattgggaaaatctcatgggattttcccatgagagattgcgtaaacatgagttttcagttcctatcataaattcttccattcctatcaccaattctgtgactatggtagagtctgctggattctgtggtcccaacagcaggacactcatacccctgcctgaacctggtgcagaacctccctgctctgggctccaaaacagtgggcgatgttcatggctcctgatatatgagttggagccacatccccaagggttaaatatgctgcctctagacaccagaatgaccttaaagctttgtgtttctttctggtgggaattgtaagatctaataacgtgctctttattttgtgagagatactaagctgctccagagaactcaatcctaaacatttcagctactacacaggatgaatggtcttagggcttgtttcgcactctcaggaatgcgtgggtctcaccaaagcttccaatagacagggccccctcatgcacatctgatccaaatacagaatagagccctaggaggttctcctgggtgttcagatggtcaaagcccctatgacaatatcatgaaaaagaagggagagttaatgaagttgaaaaaataaaagtataaacctatactgctgtctactccttgtatgcacaccgtttctgatcctgttctgagaggaatagaatgagtttctgcattgatggtgcctgctgtgcacctgtagccatgcatggtggtgtgttctatcagggtcttcatctggcacagcaatggcagatggaactaccagctgactgcgtctgtagaaatccacttccatcttccaggatccattcaacaattgtaggaatcatttcagtaaaccaaacacaagagcctcaactataactacaagtcctccaggagaggagaacgctgtctcagagggtgcattcctactggaatttctcttctctttgggacaaaccagcccagaggaggcacaggggctgtgtgtcatctggtttcctagatgaggtgtctcctcctcactgtcctgagattttgaagaaactggggagattggtgcagacactccttggatccttacaggaaacttccttcagaccacacactcctcaatttgttcccaagctccaaagtttctaaagtcactgtctaaagggcccacagtgtttttgtggagtggtggaaaagctctggggatggaaagtggtggtggttgcaaagcattctgaatgtacttactgttgctgaatgcacacttacaaatgattgaaatggtttaaaaattgttcattttgccataataaaaatactgcacactctggaggaaagtaaacctagtttaattttgaaattgttcaatggataccaatcaaagaatagtgtagcaagcaccatttcccctctcgctatagcagcaactgatccccttgtgctcttttggactctctcccctgctctctctctctcaataataagcaatgctcttctctccagtccaagctcacacttccccagttgtgcaggaatgcctattgtaactgttaatttatttccaggcagagtcctcaagattcctctgctcatattctgttctcagctgtctggagccagcatgacaagtgagccaagatcacttgtcatgagagacttgtggaaggttttgcaaaaagttccccaagaaaaaacaatgctcattgttgacagcaggtccatttccacacagtagggccatgctgggtgtgcagtggggctgtgcacactgtgcccacaggccaggctctgcactgctgactctgatcctgtgcttggtaggaccttgtgcactgctgagtccactgcagactcgaccctgaatgggaaggtggttcctagctgctgggcactgagtctcatagagggacagatggtattgaggatgcccggcccctgatgtacataaggggacaaggtctgctggtagaacaggaagatgaaggaacctgtggctctaaaggtggggtctccagccctcagtctcagctgcccatggcctcatctgtgtgcaccttgtcaatccagaccatgtgaattagaggtgaagggaattgaaggactttcccattttctcccattttctctcttggttacagaacgcacccttccacatatactgtattagagcctgtgctctacaaacatacctgacactaaattagtgacttttgaaagtgcagataggtacagcaaccagtccctctggagacatttcccataacatgaaccagtgaacccatctctgaaagccctcatgttttaaaagacaagatttttgaatttcaaggaaaactaaacctttgaaaaaaacatgattcaaaagagaaccttgccactttccattcctgcttgggctgcagtgaggacagatgcagcaagtgcttctgatgtctgtgtctgttcccctgtgtggacgcacatatccaggcgagtttcagtgaggtaggagacttcggcagcattggccgggctctggtttgcttctggtgctaacggaacatggaagagaggacaaggtagcgtgtcctgaagatcacatatttcctttttgcaggaagtgcctgggctcctggagtgttctcagggctttgatccaggccaccggctccgcaatcaacatcactgatatttcagcaggtcattgacctaattccattttagtgctatctcaaatggaaacattattttcttgtaactattcatatagcaacatagcacttaaatatctaaataacacacacagaaacagtagtctcaaatgcaaagctgtcacctccccacaccacacactttctcacccgagcccctgagcccacccttccctcggccccccctctcctgtgctgttagaaatctctgtcttctaacagggacagtgacacaaaacagccccccctcccgcccagcactcacaccgcagagcccctagtccatctcctgagggaacgtttacgtttctattctgacagagagaagtcgccgtgaatggagtctttaccccaaacccaggagtttctgaggaacacatggggtcagccactgtctgtgtggggaggcttcacctcagggaggcgcccggctctgggctgagggggactcaacgtgcactaaaaggcaggactaaggcaagtcccgggtcacagtgtgagggacgcacgcgccctgaggaggggtccctggtgctaggcctgacccaattctaaccccaggcacctttcctcagctcctgtggccctgggacacctccctaccctgcttcccatgaggctggtcacagctcttgtgagcaccgcctcctccatgtcacactttttctgtcaacattttgaggagccagttggttttctcctcattccatgttcctgtcccacctgcctgctgggggtggatttatttcatgtatgaggtttcctcagcctgagccacagctgcctcaaggacaccaaccctgtgggacactcctctgggaaaagcaaacaagtgccaagaggagcatctgaagctctggtgtgggagatgtcctccaccctgggtcaggggagtctggaggggatgagaagggaccaggggcctgggattgagctgtgaagggaaccaaaaggcaggagggacagggcaggggctgtcagctatgactcaggggaggttcctgggcctcaggatcctccctctgaggccaccagggggcgggggtggcacatgcctggacctgggaggtccctgctgggcttcaccctgggtgggtcctaggagctccttcctcctaagtccccctaaagagacagaggcattctggggtcctaaatctgtcatgcccccataaatgcatttctacgagggccaataaatgaactccaggtttatccaagcagcagcttcaggcgtctgcagacacagagcggggaggaattagccaacctgaggcaccctagaagggctgaagggggctgaaggggactgaagggtccctgtggggcctgtggtcctggggaggggagagctggggtgtctcccagccactctgggccctgtcctgacacttctcccacaaagaagggaagggaaatcctgggaccccacagccaggaccaaccgtgaaccacaggacaggaaggacagggacccccaaggctggctccatttcccaggcactgtcatgggctgagtctcaggaaatccaagtcaaggagtttcaatccccctggctgagccccactgtccaaggaaacagaagtctacgggcccaggcccaggtgagggtggggtaagaagaggagcttaggatgcagatttgcatggaggccccgccctcctctgaggcatcagggtaagacaaggctgggggcaggcccagtgctggggtctcaggaggcagcgctctggggacgtctccaccatggcctgggctctgctcctcctcacctcctcactcagggcacaggtgacgcctccagggaaggggcctcggggacccttgggctgatccttggtctcctgctcctcaggctcacctgggcccagcactgactcactagagtgtgtttctccctctttccaggctcttgggcccagtctgccctgattcagcctccctccgtgtccgggtctcctggacagtcagtcaccatctcctgcactggaaccagcagtgatgttgggagttatgactatgtctcctggtaccaacagcacccaggcacagtccccaaacccatgatctacaatgtcaatactcagccctcaggggtccctgatcgtttctctggctccaagtctggcaatacggcctccatgaccatctctggactccaggctgaggacgaggctgattattagtgctgctcatatacaagcagtgccacttaaccacagtggtccaagttcttggggaactgagacgaaaacctgccctgggctctcaggctccctttttgctctgaagatgtttcctcacccagtgcaacgggcttcctgaagcacagccttgagaattcttctccctcagcaactctcttttcccaccatgaaatccaaaggaaacctgctctgtggtttctcatccaggacagggacagcttccttttgcttgtgtgttgtggtccctgagtgggtgcaactcttcctagctttttaaattatgggagggtgacaatgagctccctgactggtgcagtccctgctgttttcaggaacatcctcatcctaaatgcatctgaatctcccactgtgtgcagaccaatctggacagatgttattagggggagtttccagaagccacatcttactcaactctgtatccaccacactctggtgaagatgcttttttggtgcccatcctcttgggtaaagtccactctctactcatgacagccatgtgtcccatcttctgaacttgggaaattgccacaccaaaccctcaggctcagggcccacataggagctcagaaagacgcactgggaaatggagaagagatctgcatccacccctcagtggagagacacctaactagataataagataaggaagtaggtttgcatgatgagtctccccttcttatgataagagagacctagagacccccttctcaggtgtgcgctcagaggcagaactctgaagcatctccaccatggcctggacccctttcctgctcaccctgctcactctctgcacaggtgctgcttcccagggctcaacccccacagcaccagggaacagcctggccctgactttcagctcatcacggcagtgatgcagggtatggcactctgagaatgagaccctcatcttcagactcacctctcctgtcctcgcttgcaggttttgtggccttctctaagctgactcagctgcctgaagtgtctgtggctttgggacagatggccaggatcacctgccatggagaggacttagaaagctattatgcacactggtaccaacacaagtcagtccaaacccctaatctcattgtatacaatgatagaaagctgtgctcagagatcactgagcgattctctggttcctgctcagggggaacagccacactgaccattactggggctcacgttgaagacgaggctatttttgtttttctggagataaaaacacattcatagtgacacagacagatagggaagtgaggcacaaaccccatcaccatctgtatcactctctttcttaagccccaggagtattgtggacaaagtcgtgagcagggttagcccagctcagctggatgtgtgaccccgaggcacctttcactctagtcatccaggaaggctctacagagggtgggtcaggagaaaatttggggctgaaaactaagctgtcctggtgttgtttagctaggtatgaattggcttaagatgacctgactggtaggacagtcacagcaagataaccattgagtaatcatgttgcctggatttccttttgtttaatgaccaaacctaaggtagctctctggtccaaaatgccctggattagtcccctggactcctcattctttaactgagacctttgatcccagctgtcatggcatcatgatgtcgtgaacagggaagtccattgtaatggcaactgtgacatcaggggtcatttacccactatctacccaaggccgcagggaatccttggcttctcacagctttttctcaccggaaaatgccattgagtgcagagtactgtgtcttccaaggatgtgccccctccataatgtggtttgggagcaatgattgcctgatgcctagattccaaagccatgctttaattcaggatgaccttgaagtgcctcctgctgagtgctcaattgtaacacattcccagaagagcctcccacacttattttctgggactatatacccgaaccctactgcatggaattcaacctctcagagtaactttccaagaaacccaaaaattaaaaactaaacaacaacaagaaaacaatatagagagaagagtatcaaagaaaagcaagttgtacaaagagagaactctggagtcttcaaatattaataagcatcaagcagcacatgtgtggacggaaactccattttcagacaaacagcagtccaaagacactcgcgggaacactccacagagcattctttctctctctctctctctctctctctcacacacacacacacacacacacacacacacacacaaacacaaaatatgaatcctgcttgttcctacagtcacagaggaaaggcctgagttaaggagcatgaggtcgaatcctcggaacagctttgcctcagtcctggagaaaatgtcagcctagacaataggctggtctggtctcaactaagtaagttaaaaagcaagttttaaaaagtaccaagtttccgagtaattatactaaatccaagaataaaagaccaaatagacagagaagtgcaagtatattctaaatccaacaaggaaaaactcaaaatgtctagcacctatcagatttccttgcaagaaccaagaaaatacatgctataaaaagcagaaaagttcatcagtccaaagtctccctgaaattgcacagatgatagactttgtaggaagaatacaaaagcgatacttataactatcttccacttgctcaagagggtacgggattgattgaacatgttaagtggagacacggtagacataaaaagatcaaagttgaacttacagaaattacctctaaaatgtccgcgataaaaataaatacataaataaataagggccaggcatggtggctaatgcctgtaatctcagcattttgggaaatcatggtagaaggattatttgagcccaggagtttgagaacagcctgggtgacacagggagaccctgtctctacaaaaaaataacaaaatcagatagatgcatggtgcacacccatggtcctagctacttaggaagtggtggaagaattgcttgagctctgtaggtcaggatggcagtgacctgtgatcatgccgctgaactttggcttgggtgatagaatgacaccgtctcaaaaaaaaaatgtctgagaataattgtagattagctcccgcaaaataatagattactgaacctgaagatataacaatgaagctcttcaaaatgaaacaccaaaaaagagaagataaaaaattacactgagcatcaatgagttttacgacatcttcaaggagccttaattgtataattaaatgaactaaaggagacaagattggtggagggagagggagggtacaaaaaccacttaaagaaataaggaaaaacgtgcaaaatttggtgaaaactataaacttatgatttcacatagtttaacacaacccagacacccacacacaaacacaaacacacagacatcatatacacaaaaaaacacacacataaagaaaacatcaacacccgccataatcaaattgcaaaaaaaaaaaaaacaaaaacaaaaacaaaaaaaaactgtgatggagaaatgctcttaaaagcagccagagagaaaagacatgtttgatgcaggtgaacaccataatgatgagagtagctttcccattagaaacaatacaagcaagaaggcagtggaggtacattcataaaactttttaaaacttactacgcacagcattgtacatattcagtgtaatccctatcaaaacaccgatgtcattcttcacagaaatagaaaaaaaaaatcaatcttgaaatttatatggaattacaaaagacactgaatagccaaagcaatagtgagcaaaaagaataaagctgcaggtgtcacaccacttgttttcaaaatatgctacaaggatatagtaacccaaattatactatactgttttatagtataaaacagacacagaccagtgtaacagaataggaaacacagaaataatccacatatttacagacaactggtttttgtcaaaggcaccaataacatacattggttaaaagacagccttcttggtgctgctgagaaaactggacattcacaggcacaagaattaaaatagacctcgatctctcaccacatacaaaagtgaattcaaactggattaaagacttaaatgtaaaacttgacactactaaactactagaagaaaacacagggaaaatagggaaaatgcttccggacttatgtgtagacaaagattttatacctaagctttcaaaagcacaggcgacaaaaacaaacatagaccaatggagctacattaaactaaaagtttctgctcagcaaagaaaacaataagcaaagtaaagagacaacttgtagaacaggagaaaatatttacaaactgttcatctggcaatggattcacatacagaataagacaataagacaagaaagcaaaacaattcaacagcaaaaaaaaaaaatgccaaataataccattaaaaagaggtcaaagaatttgaatagacatccctcaaaagaaacatacaaatggccaaagggtgtattttttaaaatgctcaacatcactaatcatcagggcaatgcgaatcaaaatcacagtgagacatcatctcaccccagctagagtgactaatatcaaaaagacaaaacataacacattctggcaagaacgcagtgtaaaggaactcttatacactgttatatactgttggtgagaaggtaaattttaaattaatacggccattatgaaaaacatgatagtgtttcagaaacactaaaaatagactatcatcatacaatgcaataatcccactactgggtatttaatcacaggaaaaaacgtcagtatatctaaggaattcctgcactcccacgtttactgcagcactattcataatagcaaagctatagaatcaacctgttttcatcaacagatgaatgcataaggaaaatgtggcatgcatacacgatgaaatactttccagtcataaacaaaagaatgaaatcttatcctctgcagcaacatgatggaactggaggtcattatgttaagtgaaattagccaagcacagaaaaacaaatgtcacatgttctctctcatgtgggagctaaaaaaagctgatctcatggaggtatagtgtagattaatagttaccagagaggctgggaagggttaggggttgtggggatgaggggtagttggtcaatgggcacaaacatacggttacataaaagcaataaggtctattgttgtatatcacacagcagagtgaacatagttaacataatttattgtacatttcaaaatacatagaagatttgaaatattcccaacatatagaaatgacaaatgctcaaggtgatggatatcctaaacactaattcgatccttacatactgtattcatgcatcaaaatagcacgtataccccataaacatatacaattataatgtatcagtaaaacatgttctttaaattaaaaaaaactgtcaattctgaattctttactcagtgaaaatatctttcagaagggaaggcaaaataaaatggttttaaccataaatatacttgcactattcatgacctgcagacacacactatagaaaataataaagaacacttctcagatagaaaatcatactaaagatgtgactctgaataaagaaaacaaaaacatcaaatatagtaactacataaaaacatatagaaatggtaaataaacatagatataaacgacttaaattacattacaaaacaactagacttaatagacaactatagaacagtccatccaacacagcagaatacataataatctcaagtgcatatggaacactctccagggtagaacctgcaaaaaaaaaatgagtaccttaaaaaaatagaaaatctataaagtatattctttgtgttacttcactcttgtattgctataaagaagtacctgagcttgggtaatccataaagaaaagaggtttaattggctcatggttatgcaggctctacaggaaatctggtgccagtatctgctgctggtgagggactcaagaagcttacaattatggtggaatgtgaatgaggagcaggcatgtcacatggtgagagtaggagagagagaggtggaaagtgccacactcttttaaacaaccagtctcacatgaactgggagcaacaactcattgtcatgagggcagcaccaatttattcacgaaggatccacgtggccccatgacccaaacacctcccactaggcccacctcaacactggcagctacatttcaacataagatttggatgggacaaatattaaaagtatataattccacccctggcccaccaaatctcatgcctttctcacattgcaaaatgcaataatcccttctcaataatcccccaaagttctaagtcgttccagcatcaagtttaacatcctaagtctcatctgagactaacctcctgtcacctatgagcctgtagaatctaaacaagttatttacacctaagatgcaatggtggtacaggccttgggtaaacattaccattccaaaagggagaaaacaaccaaaagaacaggccccacacaagtcctaaacccaatggtgcagtaattaaatttcaaacttccacagatctctagggcatgaaaagaattcagccaagctttttactaaggcatcacaagggtgaactttgctccagttcccaataactatctcattccatctgagacctcagcagcctggacttcactgtccgtatctctatcagcatcttggtcacaaccagctgaccagtccccaggaagctccaaactttccctcatctgtctgtcttcttctgagccctctaagctcttcaaacctgtactttttacccagttccaaagctgctttcacatttgcattatccttacatcaacaatctacttttggtaccaattttctgtgttctttcattcttgcatttttatagcacctttatagcaccgctataaagatgtacctgaggctgggtaatgtataaggaaaagaggtttaattggatcactgttctgcaggctgtataggaagtatggtgccagcatctgcttctggtcaggcccttaggaagcttacaaaaatggtggaaggtaaagtgaaaccaggcatgtcacatggcaagagaaacaaaaagaagaaagagagaaaggaaaggaaaggaagagagggaaggagggaagaaagaaagaaggaaagaagcaaaaaaggaaaggaaagaaacaaaacaaaaggaagaggaaggaaggaagagagagagagaggaagaaagaaagagagagagagagaagagatgagacgagacggggggggagagaggcagggaaggagagagggagggaggaggaaggagggagagagagagagtgaaagaagaaagagagaaagaaagaaagagagaaagaaaaaaagaaagaaagagaaagagagagaagagtggggaagtgccacactcttttaaacaaccagatcttgtttaaactagtggttagaattcattcgttattatgaggacagcagcaagccaatcatgaagggtcagccctcatgacccaaacacctcctactaggcccacctcctacagtggagttcatcttccagcatgagatatggaaggaataaacaatgatatcatcctctgaacactgatattgaaaaataaaaggtattatatgagaacactgtgaaaagctgcataccaaaaattagatgaaaagaaaaaatccctaaaaacataaaaactactaaactggctcaaggaggtatagaaagtctgattaacactataacaagagtttaaattagtcattgaaacctcccacaaagaacggcccaggcatgaagggtttcattgatgaatattatgaactgtttaaggaattaataataattattcataaacccttccaaaaatataagaaaggggaacatgagcagctcattctatgaggccagaagtatgctgatacaaaaacaaaagacatgaaaagtgaactggagcacaacagcctctatgaaaacagatgcaaaacaaccacacttcaacaaaatactagcaaaatataaaaaggattaaacaccataactaactagtattcatccccaatattcaagggattcttaacctatggaaattaattattttaatgctccctattaaagaataaaaccacatggttatttcaacagtcacatcaaatgttttcatgtacgcagacaggacttcctgttgttttcccattcctgttaaagcatcataaaaggcacgatttgtggtgctactggatggggtgctacttcatgcaaactggatatgtcatgtccaaccatgaatatacttagccataaatgctaaaagattgtaatttggtgtcagagacttggtggtcagtgaccacttccttggcaagtggtaagtacagacatctgaaaggataactaggatttaggtaggtattggataaggaggtgagttacacacagaaaaagtttcacttaaaaactcatagacgcttgaacacagaagatggctcaataggtctgagaaataaacaaagtccagaataactggagctgaatggaaacaaggcaaatgacatgaaccatctgtttctctctcgacaactcactggggcattgtctcctccctataccacccacgtggattgtaaaaacatctgttcttaaaactttcttgtgcatcatgacagcatgtagcacctgaatccagctcagttaaatgagggcaggacagtcaaccacaaaacccaggtggcccaggaagcacatcagggagacaagaccttgctgtcaaaagcagaggaagtgagattttccattgtggctaagcccagagcatatgaaatttcaatgggtacacaaaaaccatatagggtttggttaagctgcagatgcagtctttgcaggtttgaatggggccccagattctccatggcaaatagcctccagttgaggttgattgatgctggtcctccaaggaacacactttgggtggcttagctcctatgcaccctcctcactcatgcacagctgaaactcacctacataacgcaccttctgagaagcataagtgacctatttctcctccactaatgtgtctcagtcccttttactaaaaaggaatatctgaagttgggtaatttgtaaagaagcaaaggtttatttgggtcatgcttctgatgtctgtaaagttcaacagtgggcatctgcatccagtgaagacctcaaactgcttccactcctgacagaaggtgaagatgagccggtgtgtgcagaaatcaattggaaacagaaagcaagttctttcctaaaaatactgcaggagtttaatgatcatatttacaaagtgtttaacacagagcctgacacaccctagctgctcatgagttggcagcaattattgctgatgtcattcatgaaaattggacctcagatggagaaactgcagtgcagagagtttgagaagtttagggacaagaaagacttagtgacttaaaatcgagttctaggaactgaggagagcatccctgggcattttactgccatcttttccaatgtctcagaaactgtttcaatgtgacgtcaaccagagaggaaagcagaggggtttgcagaaccaggggctacaacttcatccacgggagagtgatgtagtaagcgggtgggaaggggcagctgagctcatctgaagggtgtttaaggttttctggcccagggatctttggccatctctccctgcccagggcctcattcttccactgaccggcaggagctggagagtggcttctgagtctggttagagatcccagcagcacccagagggggaagacattggagagacgggtctaaggtcactggagacactgtttgctgcctagagggctgcgacaggctccttgaaaacaaaattcagacactttaggggaagaaaacacaggatgggaaggctcctcaccaggggattgtggataacagagaccaaagcatctacaaggagcccagccctactggaggtgccctgaacacagagatcctaggggtgtctgtattattttgccagggctgccatagcaaagtagcacagccctatggctcaaagaacacaaatgtattttctcactattctgcagatgatgttagaatctaagatgaaggtatctacagggttggctccttctgagcactggagaatctgttccatgcctctcccagcttctgctggctgcggaggtgtttgctgttccctgccatggagggaaatcaccccaatctctgcctcacattcaaatggagtattcctcatgtgcgtgtctgtgtcacagtttcccctttttataaggacatgagtcgtgttggattgggtacgtactctgctgcagtatgaccttttcttaactaatttcaactgtaatcaccctatttaaatataaaatcccactctgaggtccttgcagtgaggacttcattatacaaatttgaggggactgaaattcaaattcctaacagtgtgtctgccatgactcaggcctctccttggggctctgcaggtgggatgtgcaccaccaacctctcaggtggggcattacctgacagcccagaaggaccccaggccctctgaaaaatgacgtctctttcatccaccttgagggacatgttttctggctgtccttctcatcctttgcatgctgacatgggagacatcatcctctgctttttaaagaaggactccttcaccttcccaatcaccccaagtagatgcccatgctggttccacagaatcaaaccacggtgggttacgagttatattagccaccagctgacaatattccctgaatgtccaggatccacccatgctctctgaccatcaccagagtgagcaaatctctgatatgtgggtaagagtttctcccatgggctcccagccgggctgtaagtgaggcaagaccccttcttcagtgcacggggctcagtgcagctgcctccctgaccaagtcttcctgggacactaagcttatcagtttctctcccccagggacagtttttggttgtcctaagcctagctcagctctgctatgaactttgcatcctaagagcccattaaacacccccttgtgcctcaatggaataacctggagtaaatagtgtgaggtgcccctgctttctgctcccagggcctcttctcctcggtggcaccagcactgccctattgaccagcaatcctcacctgcccattcaggcctctacactgcctaccgtgaacagtcacagatcacaaactgattgccaaatttgtgcagatcatcttgacagtttctgtggaactgggtgccttctcatagaaccaggaagtcacaagccaggccagctctagagaagcaactgggggagtaacatgcatcacagcgcctggacacaacaaagggattttgctgtagtcctactaggacacatcctagtgatgtctctgagaaccagtcttggtccctgcaacagaaagcctactaaacaggacagtaggctgcaaggttgggcacaatttgtgccgtgtgtgagccatgtagattgtgcatgtgtgtatgtgtgtacatatgtgtacatgtgcatttagtgttgcaaggaagggttgtgtcaaatgtcccaactcaaaacttttctgttttcctaagttatctgcttctatctttactacctttgtactatcataagaataaggataatgattagggttgaaataggagaaggaataatgtttaattattcattcttatgtgtttaatacatatcaagcactcttcaaaacaattcatatttattaaatcactcaatacgaactactccatgagccaaatattgtcattatctctccatttccagttggagaatctgtgatacagattttgacacatgggaaagctaaggcaaagaaaggaaaaggactttgcccgatgtcagaactagaaagtgcctgacccaggagcagaacctgagtcttccagtcccagagaccctgttctttaacaacagcctgtgggcctgtcactgtgctttaaggtaaagcactgacatctccctaagactccagaaagttctctgtactttttgaatcaagtaactcatacttgcagtgatttccaatgcagtaggaattctctggtgctgaggagtctactaggaatataatttcaatgcctttaaaatttttcagtagccacattttaaaagtaataaagaacgggtggaagcaactttcgtactatattttctttaactgagcttacccaaatattatttcaatatgtaatcaacataaaaatattgagatattttatgttattttcctacaacctttttgaaatccggtgtgttttacccccacatcacatcttaacttgaactacccacattttaaggactcagaagctccctgggactcatggttgctatactggacagagcagatccacatgaatgatgatccatttggatcacagcccctgcagtacttacttagaaccatcttggggcaatggagagtcctatgacccagagggcctccttagggaagaatggctgttccattttccaaccaaagtagaaatatggcgggctctcagaaaccagggaatttttacaatgtgtttcacacttcttcccttctcaaagacattgactataacttccagttcgaagataaatctgagccatcaaaggcatttttttctattggtcagtggaatgaatggcaatggtccctgtggattgtgctccaaggatccctttctgtgggaagattcttacaataaaaccaactaaaagtaggaagttattgtttatatgtagatctagatgaaagggggctgatcatgaggaatatagtattgaaggtgagtgtgttgctattcttcacaaagggctatttttgcctaactcacaagcatcaatcatttttatgaaggtgtattttcccagagtggtcttagcaagttacatccaacgctgtatcaggacccacaagcaagggtgtcagaactgacctgcctgagcggtcagcaggaaccaatgtggagactctgaggtctccacaccaccaaccatgtccaacctccagtcaagtgacaggaggagtggaagcattggttgggaagggcttggaggagctgcagtgacatgctcagccaagtacaggagcaggcatattggtgtcatgtgacctcatcttatctcagttatctcttttcaccaaactccaaggtgcaatgtgtggaggcatctgtctgtacccatggacaccttgggcttcacacattatttctatttctaatgaaccagtgttttgttaatgaattcatttcatcacatccttagtacttctaggttggaaaagcaatacatgtctctaagatattaggtaggaaatattctcccgccactcgtatttattaaagttaaaatgcttcagtatctaatgtgacagttgtccaaattcaatacccttcaccttgttagaaatggaatcctgatcctaacttgtctggagaggaggctggcatgaggagcatgaccacacatctggatgtccccagtgtcactgctaacacacgctcttttgttacttgccgtgaagggagcagagggagcatccacacctttgtccaaaggacttggaggacagtgcacctgattaaaaaatgcagggctgtgataagtgggttccgggtcctggatgagggaagagaagatgaggaggcatggggtaggaggcagggcagggaggagctgtaaggtcaggctctgagtatgggtgaaatcctgactccactcactactctctgggaggatttgataaatcttgtaacctcctgatgttggttctcccatcaataaactaaaggagaggtcgtgtcttaagcgtatgcttgctgtggggctactgtgaatgtgtggttgaggtggtgcctgcaaaacactctccaaagggcctggcacgtattaatgtctcaaaggagtcattctgcttaagctcgtggaggatgactttcctcctgtgtgcactagagggccttgttttgaggaccccagtgacttccctggtagggctcaagcacaaagggcatgactgatgcttcctctgaggccccttctattgggtaaaattcatgctccactcatgacacccacctggcccttcttctgaccttgagaaattgccaatatgaagccctcagactcagagctcagacagtacctcagacagacatgctgtaaagtggagagcagatttgcattcaaagctcctcccttcttgagcttcaagaagaggataagacaggagctcatagtgtccaggttccactgggcagtctcgaatagagctcttggaagtccctccaaccatggcctgggtctccttctacctactgcccttcattttctccacaggtcagaacatcccagggaattcagggaaatgttttcactgctattttcccatgagcaccagtcctcaggggcattctttccagttcttctgtgcattcagcatcattcatgacattctgtttacaggtctctgtgctctgcctgtgctgactcagcccccgtctgcatctgccttgctgggagcctcgatcaagctcacctgcaccctaagcagtgagcacagcacctacaccatcgaatggtatcaacagagaccagggaggtccccccagtatataatgaaggttaagagtgatggcagccacagcaagggggacgggatccccgatcgcttcatgggctccagttctggggctgaccgctacctcaccttctccaacctccagtctgacgatgaggctgagtatcactgtggagagagccacacgattgatggccaagtcggttgagccacagtgacacagatgaaggggaagtgaggccaaaacctcccacctcccctttctcctcagggactcagagtcaacagccctgggttcctctccagtaccctgagacctctgactctcctccctccaagacacccctaggcagaagcagatgcaggccatgactgaggccattttgaaaactcatctttctgtttcctccacaacagcctgtggggaccatgctgggagagaccagagcagcccaggcaggaaaaggaccttgagagagtggctaggatgagatgaccgtgtcccagtgtctcattgtgccctgtgctctattaccaggctctgccccaggaaaggacatggatcttgacctgtcagccatcatttatgagagttcaatttttacattttttaaaatataaaaactacaatctccaagatgctaggagcaatttcactgagtctcatcatggaattctgacctcccccagcatgtcccctgttcctacaatctcctgttcaagaccaactcaactccattacccagaccagctgctggatgatcaagacagggctgtgagagcctaagaatctttaaggtccacgatgagaacacgtcaagaaggatttatgttggaacttccttccccatggatattcacatcaacagagaagatatctgagttcttgcctacacctatgaatacctaagacatgaagtgtgtgtgtgcatatggtgtgggcagcacttcctcactcaacaccagagagtgtctgaggacactgggtacagacatggagacagggcatatttttatacactcaattaagccctcgtccttctctgctcaccaaggagccacccaacaaggccacagcaggaagagaagttgatttccatgaagagccttccctttctaagagtcctggaaacccactgtctagttgtggaatcagaggcagagctctggggcatctccaccatggcctggaccctcccctgctcaccctcccgactctctgcataggtgcttcctcccagggaataagccccatggaaccaggggtcagcctggccctgaccttgagctcagtgcagggagtgatgcagggtgtggggctatgggaatgagaccctaattctcagtctcacgtctcctgtctcctcttgcaggctgtgtggcctcctctgagctgactcagctgcctgcagtgtctgtggctttgggacgtacggccaggatcatctgccagggagatagcataggtgactctgatacaaactcgtaccagcagaagccaggtcaggtccctgtgctggtaatttatggtgacagcaaccagccctcagtgattcctgagcaattttctgactgcatatcagaggacatggccaccttgattattaatggggcacaggatggaaacaaggctattactgtcgctcggaacagcactgcttctcatctcacagtgacacagcatacagtgaagtgagatgcaaaccccttcccatctatgtcattctctcccttcaaccccaagaggactgtggtcacagccatcagcaggtctggcccagttcattcagatttgagacccccaggctgcccttccctccagtcctccaggcaggttcattagatggtaaatcaggggtggatacacaactattaaatatcatcatgttccaatttttcatgaagtagaggaatgattgaacatgttaagtagaagcacagaataaccaaaaaaggactaattgagcttgtgtacagctaataattgcaatgtctgtcaactttaaaaacatactggatgtgattaacaacagattagattatgtaaaacaaaagattagcaaacttgatcatgtagcactagaaaatattcaaaatgcagcacataaagaaaaaacaatgacaaaaatgaaaaagcattatcggatattcataaagaaaatgaaggtgagttataggacaacttcaaacagcctgaggttgactaggagtaatggttcacgcctataatcccagcactttgggaggtctaggagggaggatcttttaagactaggaattcaagaccagactaggcaacatagctctataatttaaaaaaaaaaaaaaaacttaaaaattaactgggcttcgtggcttgcacctgtagtcgtacctacttataaacctgaggcagtaagattggtagagcccagaaattcaagactgcagtgagtgagctatgatcatgccactggactgcagcctgggcaacagagcaagttcctgtctctaatatagggtctcaatctgtcattcaggctggagtgcagtggtgcaatcatggatcactgcagcactgacttcccaggcccaagtgatcctcccagctcagcctcccaagtagctgcgaatactggcgtgcaccaccatgcccagctaatttttgttttttctggagagactgggtctccttatgttacctaggcttgtctcgaactcctggactcaagcaatcctccagcctcagcctcccaaagtgttgagattacaggggtgagccgctgcacctggcctaaaaaaaaattttttttaatacaacaacctaagtatgtataattgacatccatggaatgtaaaaggtatgggtgggtagaaaagaatatttgaataaataatagtcaaatgtgctccacatttggtaaaaaccaaaaactggtatatccaagaagttcaacaaaactgaagcacaggaatcatgaagcaaatgactccaaatgacataatagtcaaattagtaaaatctggtgatgaagagccacttaaaagtatgattctaagagtacatttctcattagaagcaatgtaagcaagaagacagtggagcaataattttaaaatactgaaagaaaacagctgtcaaccttaaattctttatccaacaataataactttcaaaagtggaggataaatataatgttttcagacatataaaaacttacagaattgattactatcactcttgtcattagaaatgacaaaagacacccctagacagggggaaaatcataccaaattgaaatatgaattcacacaaatatcagataatgcaactccatttgaatatataatcacatttgaagacagattttaataagtgatatatgtatcacaaagcctaaagtaaacattaaacttttttataaaagaattatgactagtaagctgtattaggattctccacagaaacaacataaatcagatatgcatgtatgttatacgtgtgtgtatatatatacatatgtgtatagtatatatatgtgtgtatatatatacatgtgtatagtatacatatgtgtgtatatatacatgtgtatagtatacatatgtgtgtatatatacatatgtgtatagtatatatatgtgtgtatatatacatatgtgtatagtatatatatgtgtgtatatatacatatgtgtatagtatatatatgtgtgtatatatacatatgtgtatagtatatatatgtgtgtatatggtgagagaaaaagaacaagagagaaactaattttgaggaattggatcatatatttgtggtagctgacaaggatgaaatatgttggtcaggctgaaggctggaaattcaagtaagagttgatgttgcagtcctgcatccaaatttagcaaggcagcacttcaggaaacctccacatttgttctaaaaacattcagctcactaaagagtcccacccacattgtgaagagaaatctgcttatacaaagtttactaattaaaatgttcatcacatctgaaagttatcttcatgtcaactcctatactggtatttgataaaatcaatctggtgcatagcctacccaatctaacacttaaaattaactatcacttaacccagcaaggaaataaaaagataatttaaaaaatcaatcaaaaaaggagacagcaaaagggaaagaaaactaacgaacatatgggacaaatataaaataaagagcaagaagatccttccagctcagcctactgagtttctgggactacaggaaggtttgtagttctccttgaagaggtccttcacatcccttgtaagttagattcctaggtattttattctctttgaagcagttgtgaatgagagttcactcatgatttggctctttgtctgtctgttgttggtgtataagaatgcttgtgatttttgtacattgatgttgtatcctgagattttgctgaagttgcttatcagcttaaggagattttgggctgagacaatggggttttctagatatacaatcatgttgtctgcaaacagggacaatttgacttcctctttttctaactgaataccctttatttctttctcctgcctgattgccctggccagaacttccaacactatattgaataggagtggtgagagagggcatccctgtcttgtgtcagttttcaaagggaatgcttccagtttttgcccattcagtatgatattggctgtgggtttgtcgtagatagctcttattattttgagatacgtcccatcaatacctaatttattgagagtttttagcatgaagtgttgttgaattttgtcaaaggccttttctgcatctattgcgataatcatgtggtttttgtctttggttctgtttatatgctggccacttctcaaaagaagacatttatgcagccaaaaaacacatgaaaaaatgctcaccatcactggccatcagagaaatgcaaatcaaagccacaatgagataccatctcacaccagttagaatggcgatcattaaaaagtcaggaaacaacaggtgctggacaggatgtggagaaataggaacacttttacactgttggtgggactgtaaactagttcaaccattgtggaagtcagtgtggcgattcctcagggatctagaactaaaaataccatttgacccagccatcccattactgggtatatacccaaacgactataaatcatgctgctgtaaagacacatgcacatgtatgtttattgtggcattattcacaatagcaaagacttggaaccaacccaaatgtccaacaatgatagactggattaagaaaatgtggcacatatacaccatggaatactatgcagccataaaaaatgatgagttcatgtcctttgtagggacatggatgaaattggaaatcatcattctcagtaaactatcgcaagaacaaaaaaccaaacaccgcatattctcactcataggtgggaattgaacaatgagaacacatggacacaggaaggggaacatcacactctggggactgttgtggggtggggggaggggcgagggatagcattgggagatatatctaatgctagatgacgagttagtgggtgcagcgcaccagcatggcacatgtatacatatgtaactaacctgcacattgtgcacatgtaccctaaaacttaaagtataataataataaattaaaaaaaaaaaagaaaagaaaatgtctctagacagcttggttcctgagctgggaatcaaccgtcttttctctccctttcaacccagagtgtggcaggcgcgccccctacaggcagctaaaagagctgactgagatgccgtctccatagggagggatttgggctgagaatttgggctgaggattttcccatgccctccctggcaggctggtcccaggacactcagaagacttactgttacaggtccagagcatttctcgtcttccttttctctctccttgccaagtgaccttggaattgttcctccccatctcagccccttcccttttgtgttaagtgcagtttgcagattttgtgttcctaggtcctgtatctgtagaattttagggaaagcagtgctggtcacccacatggaattcaagacagcgagcccaggaccagaaacacagacagcagtgggggtccccacagagcagcatggtgggcaccaggtggaggtaagaaaccaggaaccactcccctgagtgtcttcagccccaggtgaactagggaggggtcagtgggctgggctcaacccaccggggactctcctgtcactgccccagcagcaccatcctggaagcccctatatgtgctaagcagctgccaaagaacttgattaattacctgtaaatttcccttcaccacacctgaccacacatgactcctgcccccaaattactaatttattaaaatggcacaattagccgaaatggcctgaatccaggacccctttcaggtttgccgctgacctctcaggtcctcacacatgccagactctttccacaggggcctgactccactgtttccaacacaaatcccaggactcatttttctctgtcagtcctgacagcagttccagagacacttccccattaagatgtccccaggctcttataatacaacctgtctgttattttctgcctaaatctttttaattatccccatagcatttacaactgtaggaatctttgcctattgttaattttattaattgattggtgttaaatatttacttaattggtcatggatgcttttttaccacagaatcacacataaaaaacagacacaaacagctaagggtgtatttctcgctgcaataatacccaccactttcacgaagacaccagggtctttctcactttttgtcccaccatccctatgatattggctttattttcatccctgctgatgtgtgacctcagggtggctgctgcagctccagctatcactcccatattcaaggagaaaagggcctcatgaatctagtgctctttcacaagagcaaagctttcctaagaagaatttcacccactgatctcacaccccactgatcaggcctgagtcacatggtcaatcccagctgagcaggacctgggaatcacaggcaccagtcttttcggtgaatatagaagacagtgctcaggtggaaggtgacagggactgtctgctgggtctgcaaacccagttttcccgcacagccaaaccagcacgatgaacaactcacttcaagaaggctgtgtcttgttcctgctgaattcaccgcatggaacgtgtcccagaccacagtgggtctggattaacatttgatgggtggatgttcttctgtctctgactttggtgcaggagtcaccactgtacgctggtcctgcatccacagcggggaccagtaagagccagtccctgagtcctgtgatccccgccctgcatgccaagccctggtattacccccatgaccacccaccgcccagacacatgtgcaggcagcctcagatggaccttcctcctcctcttccaaatattcatgttcatattgtcatgagtaatctgcacccctcgcacctggtattgaggcaggcatgagtcacaaagagaagagaaaaatttcctccattggcaccagcagtctgcagaccagggaatcagggacctgaacagaagattttaattatacacccggacccaggaggcccttgagcctccagcagccagtatggagcagccaccaggggacagaacagagtcacctggcaaagtcacttggagatagggtagacctgggtgacaaggagatgctgacatgcagggagggtcagtgaccacaacctgagatctagaaaggtgtcgtttttctacagcatcatccttaacatcgagtacaaattctccaggctttgtgtttctcagctttgtctctggccaatgttgcatatttgacacaggtgcagacactttgcttccccctacacactggcccactcttctgtgctaaaacgctgtcattgccacaaacgccatcctcccctgtgggcacatgtgtttcatcaccctcctgtttgctctgagagccccctcattctgctacacagcaaagttttctttcagcatctaagctgtacctgaccatgaccacatactgggggtacataggcacagcacctgtgccctaccctaggagctcacagccaaggccaggaacttacagcatctcctgagtctttcaacactccgtgtgcacatgacaagggtgaagtttgattgtggaaagcaccactcagaagcaatggcaggtccctgcatgtgtgccagccttacggtgtcacctgtagagtggggtcatgagggtcactgcactgggttgaaaagtgccctccagagggggagctagaaccacacctaacttctggattttgccacaaaatatttagggacaggacacccctggagtcctcaattacccaagttattctgagccagtattcaacagaggaagtaccttagatctcagaataatccctcagtcgccattgtaagtcagtccctggccatctccacgcaggacaaggaatggccacatgggcaggacatcatactacctggaaaacgcacaaagaattcctctcagagttctgcatggccagatcagctcaggagtgaggccataacacaacctacagtgacgatgtcaacccagatgatgggaccagaaggagaatgagaattctgtgtgctgagggtgggtctttaggggccccctctctctctgtcccttggggctgagcccttctctggaaaccacacagctcctcctgcagcagcccctgactgctgatttgcatcacgggccgctctttccagcaaggggataagagaggcctggaagaacctgcccagcctgggcctcaggaagcagcatcggaggtgcctcagccatggcatggatccctctcttcctcggcgtccttgcttactgcacaggtgctgcccctagggtcctagccactggtccagtcccagggctctgggtccagcctggccctgactctgagctcagcagggcccccgcctgtggtgggcaggatgctcatgaccctgctgcaggtggatgggctcggcggggctgaaatccccccacacagtgctcatgtgctcacactgccttagggctctttcatccctggatctgtgtccaggccaggcacgtgggaagatttacttggagttcagctcctcagtttcaagccttttctctcccgttttctctcctgtaggatccgtggcctcctatgagctgactcagccaccctcagtgtccgtgtccccaggacagacagccagcatcacctgctctggagataaattgggggataaatatgcttgctggtatcagcagaagccaggccagtcccctgtgctggtcatctatcaagatagcaagcggccctcagggatccctgagcgattctctggctccaactctgggaacacagccactctgaccatcagcgggacccaggctatggatgaggctgactattactgtcaggcgtgggacagcagcactgcacacagtgacacaggcagatgcggaagtgagacagaaaccagccacctcggcctggctcacaagacccttccctctctcctgccctgtcacactgagcaggagggagccttccatgtggaatggaagtttccagtcctatccctgcccttatgttcctgagagacgggagcaagttcctgcccacctctaggctcagcttatcccagaataaactgagctagtcattttgatgatcaaatgccagctcccaaaagaccccagaaaccctgatatctaagtagcaccgactctattagtatcaagggagactagccctagggtggaatcattttagtgtctcagaaggcacagggcaatggaaagtgtttatgaggtttcaggatatgcacgtgagcagttaaaggcaggtcttacaaggaaggaacctactagaattggggcccatctgtgacatcatagcacagcctggtggacacagagaagggaaggtcctgaatcaagtcttgatcagtaaatatttattggataagtgagcaatttacataggtgagaactgtgtgctctcttgagcagaacacttacctggataattggttttcaggaattccctgaagcaatgagtgacattctttattgttttcaccctcatccacctgggaaagagtatcctggaaccagcagttaacattgacacagctggtctcggtcctcagcacaaacattcattgcaggctgaaaagtgacaacggaagagaaaggagtttattaaatccctagacacaaacaaatccataagcagagatgagagatgcgggctcagctggcccagtcccacaggggtcattcctcttgtgatggaaatgaccacatgagggtcccccaagcggtgttggggggcagtcatggggaactggcctcccagggctacctgctgcttgggctgggcagaggttagagggatggaagtctggtccagtccttcccagcagcatctccaggctcctcctccctctactggggcttcccctccactccccagaaccatcattgcttcctcatctcctgtctcctccctgccccaaggccctccctgtgctcaccctggctcctccccctgctccatgcccagcctctgcagagcagcccaggcccagagacttgggcagaagcttccgtcccaccagctgcagaaccttccctacagaaccaggccagtccctgtgtctcatatttgtagagatcccaatcaccctcagagatgacgggtgggaaaccagcccacagtgacctaggctgttgggcatatggccttcaagctggccttcaagcccacttggctgcatctccttggccaactccaacatccaggctgggagtctggaatcctagttcccctggcccattcactcccactagggttgcttctaaactccctgggcctcagcttcctagtctgcccactggaagcagcgacaggcattttccagggctgcggtaagggccctggaacaccctctctcaccctctctctccctttctctctctctctctctctctctctctctccccctccccctccccctccctctccctctctctctctgcctctgtttcctcctcagtagtgggaagaccccctgtcaggtgggccagtccatgacatctacagagggagcaggaacctctcctatttcctggaggagagctggggtggaggctgcaacccaggatcatcagaggagctggggtcttcaaggttcctagggaccccttaagcgggggtcagagtggcttcagcggtcttattgctcggtccagacagaagatgtttccagttgtgaaaaacgacttcagggacaacaaaaacagagattcgcctctccagacaccagtggttggtgtgcctggagtactcctcgtaccaggcaggggagagagtcctagacagaggaggttctaagtgtcacctagatttcaggcctcggggcctgtattgggtaggtgatgtcacagtgagttgatgctctgtagccccttccctaggaggtggcagagggaagagctggtggtcctctgaggtgtgagtgagtccaaccctgagggtcttcccaagctggaggtccctgggtgtagacggaagaggttctggtcaaagaggcctggtgttgaatcctggtccatttattcatttggtcaagaaatattcatggaggacccaatatgtgccaggtgccaagccaggtgactggggacacagtgttgagtgggacagttggctccttcactgctagaggtattatattctcaagccgagactcggctctacgattgtatgtcagatatatagcctctatgtgcatgtctccagagactggtttcctggagttccaagtgacagccatcactcacctcgaatgcaaaaattaaaggagcatccaaaaacctagtgacccagataaataatacttaatgcaatattttcaaaaatcaaaattaatgcccaacaaacccacaatgaacaaaatttcaggatctgactcactcacctcagtggttttgttcttggtcctacccacagtcccacaggtgagtgagtacccacagggatgcaaaaccagagtcaggcccctgcaccgccttctgcccggccaccagagccctcccctgggtcttggcctttctcttctgaagagctccagccagttcctcctcaggcttcctctactgctggtctcttctgccccctactggattctccccttacagctgcactccaggcagctggtggaggttaaagaacagaaacctcccaaaactccaccctccagttccaggctggctccacctcatgtccaaaaaggctggtcctccaggtctttgattgctattagtaagtcccaagacacagtctttacaccaagtcgctgtgtgccttgggcaagaaactctccctctctgagactgtgtttccacactggtagaagtagctagaagacctccctgccaggttggcaagtccactctgtgacatctacaaagggagcagggatctcttccatttcctggaggagagctggggtggaggctgcaacccaggatcaccagaggagctggggtctttggggttcctgaggactcctcagagggggatcaggagctgcagagccagcttctaactctggggactcagagatccagaacctttgtcatatccccagccaatactttgtcatcctgtgcctcagactcccccagatcccaagagtgagaagctcaagacgagacaagaaagaccagccagcttgaatttagggatggtggggagtggggagctggggacccctggacctgggggagaggagtctgcagtgcctgcaggtggagtttctgggacctgggggatggagactgggcaggggactgaccagcagaaggccaaggtgggggataccctcagacatggagcagggcagaagcaactggatggggtacatccctctgctttgggagagaagggccagggcgggacccagagagctctgcagaggcaccacagaccctcagcagggggtctgccaaacaggacagctggacttggctgcttctgcccaggcctggatccagcccttgcacatctcagggcaggggataggcctgggtggccagagctgcagctgcacctgctggggaggcctagtccagtcctccagggtccccagacagactcggatttccgactgcagccaccatggaaggatgtggtctgcggtgacgatgtctatccagaggccatggcaggtgcaagggtgggggtaggggcagcagctggggatgctacatttagggacagcccctttttatccccaagacctgggactgtccctgaaaggaaccacagcttctgggtcctgagcagtgggtgagtgtcatacccacagaggggctggaagggagcagcttcagcctagactcccagggcagaccctgccccagccccgaatatccaaggagcccaagatcagaggcaggaataggccaagctccccagtggagaagctgtgctggaccaggggtttcccagggccctcccttgtgccctgaatgatgtctgttagggcacctacaccctgttactgctcagtgccttgcctattttgaaggacagggatgtgtggtgattatttgtataatccagcccccagcacctggtcctcaaaagttacccaagcaatgtgtataaagatccagcctggagatctttgaaaaccgattcgatgagtcgaaccattaagtcatgatcaccatcctcaacttcatctctttcttcctcctcctcctcattatcatcaccttcaagaactgttaagagtctgagacttcatcctatttgcagactaaaaagtaagcctgccacagtgccatggatgctggcagaagatacaagactcctgggtcagagacaacgaataatctgtttttcacagcaatagcagttgccaaggtatcagcattgtcttgcaccagttccacaaggtgatgcaaagagggccaggtgacatctgcatgccagagctcagggatcccaaatatttcatacttgacagtaagcatatatctgtgttttgctccaaagagaggcattctctgtaccttccgaggttgttcactccacaaacactcttgaaaagataatccacaatcagtgcctttgcccgagagacatgcagaaatgcagagatccatagtagaccactgtctcccaacaaccatcaactttatcaatgaaatgaagtctcaggctatttgtctgttaccatagcccacaaaaatgtctggcttgattgtcaccaaatgtatcaaggaagttaaggagtatctgacacaaaatgtgaaccaagcaattctcaaaggagcctcccaggaaattcactttaggaagtcctaggaggctcctctgagagttgctaaaacaaaacattgagagtcctagagggctgcagatctgaacttgagcagatatttttaaagattttgtggcagaaaaagaaactggaaagcaagagggcagaccctcattgcagttctgtaatgtaagggggcagagcaggggcctttctcaccagagtatggggtcctgaagatctcctcaaacatttttatactaggctctcagggcaacagaaaagatgggagcgatgaatggggcgtaaaggagtgcaaatgacacaaggggtcacatgaagcaaaagaggtttattcaaccagatttagtccatgtttaattgagccactcctttgtgccaagctctgggttttcccatgcaccaagcagtgtgttaccacctagacccagagagccatgtcatcatcagcaaagcacgccctagtgtcatgcaaggaccaggcctcagattccgactccagacctactgcctcttggccctgtgacattaaaagagtagggaatcagcctgagcagcatttcctcatcttcaaatgtggaggacagtagatgatcttagctcccaggattagtgcttgtaaagcaataataatgtaatgcattattattgtattatgcatcatattcccatattatagtcaaaaaggaccccaacttaaagcacctgccagccctctcctcctccaccactgccgaatggagccaggcacgagtattccaggtggacagacgaatagaaatacaggggacgagccccttcctagatcctagcgcagcttgctccctacttaaggaatgatattggaccctgcattcatcttctctggatggtaattttctcacctgtaaaacagagacactggccccaaggacaccccacaagtagttgtgaatcccaaagtaagagaagaacaaaaaaagaaccagaatttattcaacacccactgagtgcttagcaaacacatggtttctttaactctcataagcttcatgctgcagaggaactctccccattttacagataaggaaactgaggcccagaggtaacctaggtctagatagactccacatttatgacttcaccactcttccttgcctgaaggatatagaatcactccctgcagggctcttgcctgactcaggaaagggccacaggatagccagccaggcttaaccaacccagccaagaaagggctggtcccaactggctggagtgcagtgtacaggcacccagcctggaagactgatcagaaaagaagccacagctccagccccagccccaaccccctgagctcaagcccttggggactcctgctgggcagctctctaggccctagggagatgctccacagacccaggctgccctttgggaagtggggaagacaagtgggtcaggtgtgcaccacccaggggcggggccaggcagccggctgtggtgggaggcagttgagccctggattgtgaccgcttcagggcagttggtagatgcccctctgggagagatccccaggggtgacagccatggaccctggaagggcctgggctagggacagggaccagagccagtccagggagaggacagagccaatggactggggtgtactgtaacagccctgctggcgagagggaccagggcaccgtcctccagggagcccatgctgcaagtcgggccagaggtgcccctgaacctgaaggccaatgagacccaagacaggccaagtgggttgtgagacccctgaggagctgggccctggtcccaggcagcgctggcccctgctgctgctgggtctggccatggtcgcccatggcctgctgcgcccaatggttgcaccgcaaagcggggacccagaccctggagcctcagttggaagcagccgatccagcctgcggagcctgtggggcaggtaaggggcaagagattccaggggatgtgggggtcctgcagcagagctgggaaagggtgaccaaggggagacaagccagaggagtgaggaggaaggttaacccctaagaggggcctgggctgacactggctttagtaatgggttgatattttgtccatcacagatttgtttgaattactgtttttaatatcatattacgatattatttttcttgatttctgagttttctggcgccacttaaattttcaccagggtcagtgcctcaatcacctagtcctagtcctctgggtagggaaggaacagaggcagggacaggacatccacagggggtggtggccactgtccccacagggtgcccaggcctgttcctccccctcctcctctctgcccatgtgcctcctgcccagtgagggcaggggccactccctggagaaggcagcaagggcttggtttggtctcccccaaggctgtctgttcaccaacttgcacataaatgcttactggggccaggctcaaggacacagggagggtgggatgaaccgaggggagctgtccagtcattggaacaggcccacggcccatgtttggagcaataaagggagaggggatctccctctgggatgatgcccaggctggtctcacagatcgaggggcactggctggtgatgggtgcccccaaaagacagagcagcgtcagaggagaggagagcacaggatgaggctgggagctcctgggtgactgggaaggggaggcaagaagaccatagggtccgtgcaccattcccagtccaggacgagtccttggatggatttaggtagattgattatcagagtcagatttgtgtttttggaaaaatcagcaccggattggaggctgatgcgacgcccgattagaggagggaggagagggggtgatggccaagtccagggtaggtggggatcctggaggaagccgtgccttggggatggggaggacactcagattcagagcacccaggggcccagtttcctatgaaatgggagcatgaagttgaagtgagggctgagcagaggggagcagacacgctcggggactgtctatgggcattaaaaatgtataaccattttagcaacaggcggcgagtcaaaaaacaaagtgtgtttatctaaactgggcaattccacttctaggaatttatcctaagggttggttgggggaataatcaaagctgtaaccaaatctttataacaagggtggttagctcagcattattagtgatgggagaaaactggaaaaaatccaaatatctaccagaaagggtgtgaaaaaacacaattgtatttgggggactgttgttgtttttgttttgaaacagtcttgatctgttgctcaggctggagtacagtggcgtggccacagctcactgcagcctcaacctccagggctcaaaagatcctccagcctcagcctcctgagtagctaggactacagatgcaggccactacacctggctaattttgattaggattattattagtttagagacagagcctcgctatattgctcaggcctgtctcaaattcctaagctcaagcaatctttctgcctcagtttcccacgtgctggaattacaggcgtgagccactgcacctgacccaactgtgtttttaaagtatatatgcattttcaaaaacctgtcagaaaatatagaaaaatgtcaatggtgtgtctggctggctgatgggatttcacctaattttaatgtggctttataattttctggttttgtgaagttgttcacaaaaagagacatttcttctaatataatttttaatacaacagtaatgtactcatgtgcattactctttttgtaatgagtatattacaaaatgtaatgacttttgtacattactcttttttcttgccaaaaaaaaaaaagattaagcagagaagtatataaagtaaaagcaagtgcttctgcttaccatctctcacctcttcccagagatagccactgtcaggttggtcaatatacttccagaacttttcctgtgtgtgtgtgtgtccctgaaaacacacacacacacacacacacacacacacacagttggtgctgggattttattttgcaaaagtaagagccatattctgcatattaccaacttttaatctattattgacactttctgtatcagtccatatggattaaccacattcattgcttataaactttgttttataagcaaagtttagatgagccagaatttatttccactaaaaaatctaaatgacaaatgatgctgcagtggaaatttgtgtgtgtgtgtgtgtgtgtgtgtgtgtgtgtgtgtgtgtgtgtgtatgtgtacaaagtgcacttatatatctccccaggatagatgcctaaaagtggaattgctggatcagagagaatgtacttttgaaatcttataggtagtgtttccaaaagtctgtgtccactcactccggtgaatggtagtgccttcgctcctacattcttaccaataatgcaaaattgttgatctttttatattctgcccatctgatgagcaaaaaattgaatgtgtttatggttttattgtgtattttattactggtgaaattattttttatatttttatttattggttttatttcgtctgtgaattaactggtcatcatgttgcccgcctttccattcagttgctttcatctttttatatatcaataacatattgggatatatttgggattttaaccacttgtttagtgtatgtattgtaaatatttttccctggtctgttttacgggtcttttgtttatggggtctcccaccataaaactgtggtaaatttttatgtgtcgaactggtttaatcttttctttatggtttctgtgacctccaccatgtgtaggaagttgtctttatttcaatattataaactcatttttctgttttattctggtacttttggtgtattggtgttttatttttttttctttacttcccctggagtttatttttgtggatgtaggaataagaccttattttccaaataggaaagccaatcatcacacatttgttgaatataaatgcaacttttctcaattactacattactgatttattacattctttctgtggttctcttggtttattgagctattcctgcgcccaccctgttttgattattttagctttatggtatgttcggtaactggtagggaaagaacccgtcattgttactttttctcaaaatagtcatgtctattatctgtcattcttagagttggactgcagaattggttctctaattttcaaaaatcattcttgtgttatgtggtaatatcacagaatatgggattaatttgagaactgctatctttataatgctcagtgtttttgttcagagacatgatgtactctccattcactcagataagtggtttaatattttattcatgcaaatcttgcacactttgttttttattcataaagggtttgtaaatataattttattgaagttataaattttttcacaattttatatcgtaaatgattactgtttctatagcaaggaaccctattaacttttctatgttgctcttgtatccagacactttaactcttgtattaattccagcagttcttcagctgattctccgtgtgtgtgtgtgtgtttgtgtgtttagttaactatcacaccatttgccaagaacaattttctctctttttctgtaatatttatacctccttctctcccccttttatgtcatttcattggctggaatctatacaatatgctgaataataaaagtgagactagacaaccttgccttgtttctgattctttaaatgttttgcctttaaatatgaaggttgctgtaaatttggggagatattcttcactgagttaagaaaattttcttcagtaacttaataaaaggctaaatgtttgctttctttatatgagaaacaagtgttgaatttatattactattatattaaattctgtttcaaaaatcttctgcacatgtcttaaatacaaatgtattaaatacaagctgctgctaagatgaaagttgctggccccatcacaatgggtatcttccaatgtgaataaattgccttggggaataaaatcagatttggaaaaacctgaggatggttgccatcataaactcttagagtgtgacctgggtgtttttctttttctctgtaggatgttaatagtatcttgtgtcatgctaggatgtctaggacagagggcaatacaatgaggggaaggcattctgcgatgtccccaggcctctggcttgaagagtaacttgctgaagtgaggactctgtggaggagcaagttatacagaaagaagtttagttgtgatctgttgagttggaggtgtctacagggcatccaagcagacataggttgaggaggcagaatatatgtgaatctggagccaagaagagaggtaagggctggaaatagggatctaagacccctggacagttgtgagtgtgcacaatgagggtcagatgcagagaaaattaggagactacagagagcagaacccagggtggggatctgggagtcagcagttgggcatgggcctggtagaaagggaagccaaggaggaggagagggggcagtctcagacaccaaggaggggagagtgactagaaagaaaaccttcttgcagagacataggggatggggaagaactgcagactgaactggggcaaaggactgttggccttaaccagagagatttgagggagagatgaggctgagagccaggggatcctgccatgtcccagcataaaaacagtacctgacacagatgggtgcttgggagctgttgtcggatgaatgagtggacagatgcatggatggacggatggatggaaggatgatagattgatggacaaacagatgaacagatgaatagctggatggacaactggatggatgggtagacagaatgatctcagagatcagaaaaagcttcatgcactaagtgggactgaaccgcgtctccatgggtagaaagcagaggaatctccacttgagtcaggaatgacccagtgctctcaatccagggagaaagccagcctggcttcactggggacacttgtgtgggggactcagaggccctttaaatgaggccagacgaggttggacaggtccaagccaactcagcactcctctgccacactgcacaggaggggatgtgtcactcagggagttgctgggacctatgggtcccagtgttgtcatcagcaccgacagcctcagagaggaaagacacacactggggtaactccaaggctgtgtgtggcacttgccttggacagcagacaggcacagggacacctctagggggctggccacccccctgcctcatgtctaggtcccagccccgcccactgcaaccctgtgcccgtcatgcccagcaggctcctgctccagcccagcccccagagagcagaccccaggtgctggccccgggggttttggtctgagcctcagtcactgtgttatgtcttcggaactgggaccaaggtcaccgtcctaggtaagtggctctcaacctttcccagcctgtctcaccctctgctgtccctggaaaatctgttttctctctctggggcttcctcccctctgtcctcccagccttaagcactgacccttacctttctccatggggcctggaggaggtgcattagtctccgggtaaccggcaggaagggcctccacagtgggagcagccggatgcagcctggtcccggggcctgagctgggattgggcagggtcagggctcctcctctcttccagggcagatgtctgagtgagggacagaggctggttctgatgaggggccctgcagtgtccttagggacattgcccagtgactcctggggtcaaggacagaggctgctggggtgggcctgggagctgctgagtctcatagtctaggggagcagccccaagaacagctgagggtctaggctgaggactggatgccaatccagcctgggagggccacacggcctggtgacacagaggtcaccccaaggggagaccaatggagggcacagagagggctctgggtctaggctgcagctctgtggcctgtgctgggtcatgaggacatggggacacagagggacgggtgagactgggtgaggtgccagaatccaaccctcccaggacagtcaccagaaaggagacagtctcttagggcagagatgtgtctgtccctggagccccgtcacctctggggcccagtgtctctctgttcacggatcggcctcctgccttcctcaaagggcatgttagactcaggaaatgaccagaggggagtgaatgaggggtgcagagaactccatggctaccaggtgaagtttggggtcatcacaggctgctggggtgggcctgggggctgctgagtctcatagtctgtgggagcagccccaggaacagctgaggtgaagggttctgtggtcgggcttgtggagacaggaaacatctcagagcctcagaggagccctgaggcttgtctaggtggagcccactccttgccaggagagccaagtgggctgggctggggcagagcccggtgcctgtgagggataggaagctccagttcaaagcaggcttgggtctccccacacactgcctgccaggacagtcctacaggatgagcaggggacccacagttcacggaggaggctctaggtcctggaagaataaagtgggtgatggaggggggtatagggatggaaatgagggatccaggggtcaaggccagattctaaactcagactccagagatcagagaagaaggaacacagcctgccctgggtatatggagaaattgaggctgtagaggagaggggctgggccaggacacctgtgaaaggtgacttgggagggctcctaggaaggcacagagctgtctgctctccacagggcatgagtggaaaggatggggaaagaagaggagagaaccccgggtggaccggatggccacactgtgaaccctcccagagactttagacagagagaggggctccacaacaccccggtattctgtctgccctctctcacccccttccctgtccacacaggtcagcccaaggccaaccccactgtcactctgttcccgccctcctctgaggagctccaagccaacaaggccacactagtgtgtctgatcagtgacttctacccgggagctgtgacagtggcctggaaggcagatggcagccccgtcaaggcgggagtggagaccaccaaaccctccaaacagagcaacaacaagtacgcggccagcagctacctgagcctgacgcccgagcagtggaagtcccacagaagctacagctgccaggtcacgcatgaagggagcaccgtggagaagacagtggcccctacagaatgttcataggttcccaactctaaccccacccacgggagcctggagctgcaggatcccaggggaggggtctctctccccatcccaagtcatccagcccttctccctgcactcatgaaaccccaataaatatcctcattgacaaccagaaatcttgttttatctcattttttttctcacataaattgctagcctccccggggttctcagtgtggggtacagggaattctgcacccagtgtgaaaatcacccaagggaggaggctcacagcctccctgagtcatctccccagagggtccttcctctcccagtcaccccttctccaactctccactgtacccctgagctaccagtctggcatcagttcagaccagtcccacaccctcctaaattttacttctcaataaatacctgatcatgtaaaacgcagcatttctaatgtgcagtctctgtctggtcatgtgtctgggctgaagggtcactgctcagggacagggggcagttccaggtgagatcccatgtctccgtcatcccacaccccacccaacctgccagggaaccgggtgagctccctgtgccagtgggaactgcaatccaaggcacaaaattgtcctgcagtccttgcccacctgggaagggacaggggcccagtgagaggtttgctggcgccctgtggggagattcaggagaaatgaagggggtccccggagaccagatgagggctagaggcagaaataatggaaaaaggacacccttgactcaaggccacggtctcagcaggaacagaaggtgaaattccccattgcatacgaggaaccagtcaggagagtgtttactgggtgagggataaataactgtgctgccactgggaacttgtaaaaacattgggaaaggaaacatgcaagtgtctttctaagacttgtacaatggacattggctaagtaaacatactgacaagtcctgcactagggaaccagtttaatatgatgagccacagcatatccaaaagcatgttgatctccttcttcacctttagaagacccaaaacactctgaaagataccagcgtttcctggaactagtttgtggaatatggggtgaggttgatgcacatgatgttacgggtatatgatcacatggctgtgggttggggatcaggctcaaagttaacactagcgtggggctggatgtcaagcatgaagggtgtggaccactaagtcaggcccaggtagagttaatttctgattggtttgtggctggagcttgatgatggtcagtctgcaggagcaggaggatgtggggaaattgggaaaatgagaaaagtcacaaatccaagctcaaactctgcatctattgattgcctgggggaggctaatcagagttgaattcaggatgagcttcagggctgggtcagactgaataagagctgagtgaatgtgggctgatggctccaggcaagtcctggcctccactaggagtcagatcccacaaaccctcctgcccgcagagcaccctctccctccgtagctcatggtggcgcagcctccccaccccatcccatgtacacctgctgcctcatctcagagacactcattccagtgtctctgacagcagatgatgtcagcctcctgggtgtggagaccccagctgtcttggagagtcctcagtgcctgggtactctcagaccccctgtctctgcctccagcacatcagagacatagcagctgcctccaccagagctgctgggtgatcccaacaggccagggacagagcctgcaaagacaggaatctctgcagtcacaatgaggcaaagaaagagccccttagagcttgatcacagccacccctgatccaaatcccagcctctcattagaaggaggcttgagggttctgttgccacagcacctgtctgagcccatttcatggaggggaaaactgagatgaccaagggccagatccatagtcctgctgggcacaaggccatccccagcagctgcctaatctttgactgtgttataagtttccattatggaaaactttgaacacatacataaggagacagagaaataataatgcccccaagttcccatcacccagcccccccaataagcaattcacagacattactgacccacccatagcagaataacccctccattacacaataccagacatcacatcttttcagctgtaaatatcccatttctatgctggaaagatatgggcttaaaagtaactgcaatattattaccaaacctaaatagaaattatcactaattccctaatatcaagaaataatcatgggctcctcaaatccctcacaaatgccagaagcgtattgacttagttaagtgttggtgctgtggttattttggggttttgggtggtttatttcagaattcaatatggcatcaaatggtgatgggcgcatgtgctgtcaggccagttgtcactggtgaatatttcctcaattgctctagtgctgcctggcaaggcaggagctgcaggagttgagagctgtccggggaccttcccacggttggaatacagccacacctcccaaaacaagaacccagggctatcatctacttctttttttttccccctgcaaaatggttctagcatggagggacttaactggattcagactagacattgcaaaatagcttccaaggacagggagctgctaacagcgagatcacccatgtcagattctcactcttgtagtaatgttagctgcataggatggtcaatagctacatccctcagaagggaaggaaggcagagggatgaggcttcagttcacctccttctcatgagtgctgcagagcatctgtgaattcagaggtctgcagctgggctctgttcacccaggagtgtgcttcatgctctaggaaggagccactttgcacacagatgatccggggcccagccatccttccagggtgaataattaatgtcttctctcatggtgaactctaggattcaagccatctaatgtttttgaagccactgtcattatatttaattgatgatgacaggtggccaccaatgatgaatattttcccagggggagtctccctaagtggctttagacttcctcacatggccccaggggattaaatggctcctgattactcagaggataagaggttctgtcttatcatgttcctttcttatttgtcttatgtgtctttcctgccccaggcctgggatcccccactgatctcccttcccttagtgagaggtggtatttggagaccacattctggaggctcccttatgtcccccatttgaaaaagacaacggcagccaccaccccagctgtcccacccaacatgaggccagattcggggtgcagggatgctcccaaggttaccctaacagatgtgactggcacttcatattgggaccagccaggcctcactgaccaggcctatccaactagaactactccagaaggtggggctgaaacccaccaaggttcccagaacactgcactctagggcaatcagcctctgcatgggaggagaggggcaccctctgcaccaccccatggtgttaccaaaagttgaaccatgggttggttcaactttgcagagaagagaccacctaacccatctgtggaaattcactccttagcgatactgatgctccctaagaaattcaatcctgggcctgagtgatggttggtgcaaaaaacaaattcaagatcccagtgtcctccagaagcctggatttccagggatcctgctgtgagtcacaggacgtcaccggtccccttctctttgtgggttgagtgtgggggccatgtggactccctcatgagcagatgccaccagggccactggccccagcttcctccttcacagctgcagtgggggctggggctggggcatcccagggagggtttttgtatgagcctgtgtcacagtgtgtggtattcggcggagggaccaagctgaccgtcctaggtgagtctcttctcccctctccttccccgctcttgggacaatttctgctgtttttgtttgtttctgtatcttgtctcaacttgtggtcagcctttctccctgcatcccaggcctgagcaaggacctctgccctccctgttcagacccttgcttgcctcagcaggtcactacaaccacttcacctctgaccacaggggcaggggactagatagaatgacctactgagcctcgtctgtctgtctgtctgtctgtctctctgtttgtctctctgtctctctgtttgtctctctgactgtctgacaggcgcaggctgggtctctaagccttgttctgttctggcctcctcagtctgggttcttgtcggaacagctttgtccttgggttacctgggttccatctcctggggaattgggaacaaggggtctgagggaggcacctcctgggagactttagaaggacccagtgccctcggggctgatgctcgggaatcacagagctgggacccagagccaggatccagacccagaatgaggtaggaggtggaggggctgccctgggcgtctgggggctgccagggactgagccctgagccagcctgagactcaggaaaccccgtcaggagggagaagggagaagcagactctggacaccagaaagccaggggaagggtcacaaaaggagtggatgtgacggaagggcgggctcctgggtctcttcagaacatatcccctgtgcccagggggatcagaggggcagagtccactgcgtgaaagccccactgctatgaccaggtagccgggacgtggggtggatgccagaaaagactccacggaataagagagagcccaggacagcaggcaggctctccgatccccccaggcccttgccccatacacgggctccagaacacacatttggctggaacagcctgagggaccaaaaggccccagtatcccacagagctgaggagccaggccagaaaagtaaccccagagttcgctgtgcaggggagacacagagctctctttatctgtcaggatggcaggaggggacagggtcagggcgctgagggtcagatgtcggtgttgggggccaaggccccgagagatctcaggacaggtggtcaggtgtctaaggtaaaacagctccccgtgcagatcagggcatagtggaaaacaccctgacccctctgcctggcatagaccttcagacacagagcccctgaacaagggcaccccaacacctcatcatatactgaggtcaggggctccccaggtggacaccaggactctgaccccctgcccctcatccaccccgcaggtcagcccaaggctgccccctcggtcactctgttcccgccctcctctgaggagcttcaagccaacaaggccacactggtgtgtctcataagtgacttctacccgggagccgtgacagtggcctggaaggcagatagcagccccgtcaaggcgggagtggagaccaccacaccctccaaacaaagcaacaacaagtacgcggccagcagctatctgagcctgacgcctgagcagtggaagtcccacagaagctacagctgccaggtcacgcatgaagggagcaccgtggagaagacagtggcccctacagaatgttcataggttctcaaccctcaccccccaccacgggagactagagctgcaggatcccaggggaggggtctctcctcccaccccaaggcatcaagcccttctccctgcactcaataaaccctcaataaatattctcattgtcaatcagaaatcttgttttatctcattttttcttttctcacatataattcctagcctttcctgggttctcaatttgtggtggaaagaaccctgaacccagtgggaaagttgcctatgtgaaggggttctcagttccctgggcatctctgcaggtaaggccttcctcacccagacaccccttcctcagctctccactgtacccctgagccaccagcctcgcctggctgggaccaggggggtgtcacactctcctagattctgcctttcaacagaaacctaaccacgcatcacacggcacttctcgcatgccttctgtgtctgctccagtctctgggctaaagagttgctggtccgggacaggggataggtccgctcttggtcagatgccaggtccctgccatggcatccctgaccctatgcaacaagccagtgactctggtgagctctctgtgtcaggagaatccatgatccagagtttcatattgtcctgcaagcatctggtgggctgtagctcttgccaaactgggaaataccatggcccagcatcaggatgcaggacagtccggagagggaaatcaggagaagtgaaggggtctctggggagcccagatgtgggctagaggcagaagtaagggtgaagagcacctatgagtcaatgtcatggtctcagcaggaacacagttgaaaatccccattccacacaagaccgtttagcaggaaaggagtccatacttgtgctgccaccaggatgtcctgagaagccttggagaatgaaacatacaggtgcatttcctagacttgacaatgcacgttagccaagtaaaggcaatgaaaagttctctactagggaaataatttcctgtggtaaagcttagcttatgtaaagtcacatttatccatctggcacctctaaaagccccataatattctgcaagatactagtatgtcatggaagtagtttatgaaacataaagtgagatttaagaacaaagatgttacgggtgtatgataagatggctacaggctcagggtcaggctcgaggagtgaaggaggccgtgtcaaattcatgacaagagttggagctgggccaggctgggtcagggctgtgtgaatgcagacagagggctacaggcaaggtcaggcatccatgaacactcagctcccccagaccctcctgcccactgggaccttcgccctcccttggtcacagtggtggagccttcctacccaaacctctatggaggccctggatgactgtgcgttcttagtgcccacgcaaacttagactccctgtctctgcctccagcacatcaggaatgtggcagctgagttcaccagagctgctgggtggtcccgacaggccagggacagagcccgcaaagacaggaagctctgcagtcacaatgaggcagagaaatggccccttggtgcttgatcacagccacccctgatccaaatcccagcctctgaattagaagaaggctaaaaggttctagtggccacagtccctgtctaagcccatttcacaaatgagaaaactaagaccacccaaggagggccagttacgtaggcctgctgggtacaaggccaaggtctacttcacacccagcagctgtccaaagactgagctgtgtcataagtttatattatgaagaactctgaacatataaataaggagacagaaaaataacagtgtcccatgttctcatcacccagcactcaaaataagcaattcacagatgatgccgacccacccacagcaaaataaattctcccttacacaacatttagaaagaaatacaagacatcagatctgttcagctgtaagtactccattactgtcctggaatgacatggaccttaaaataactataatatcactaccaaacctaaatagaaattatcactaattccctaatatcgagaaataagcagggtctcctcaaatgcatcagaaacaccagaagtgctttggcttagttacatgttggtgctgttggtatttgggggtttaagtttatatgaggagcaatatgacatcaaatggtgatgggtgcatgtgccatcaggctggttgtcactggtgaatatttcctcaattgctctagagcctcccggcaaggcaggagctgcaggagctgagagctgtctggagaacttcccctggctgctatacagccacgcctcctggagcaggaacctagggcttccctcagcttttattttcctggaaaatgattctagcatgaaggggattaacttgattcagattggacattgcaaaatagcttgcaaggacagggagctgctaccagcagagtcacccatgtcagactgccactcttgtagtaatgttagctgcataggatggtcaatagctacatccctcagaagggaaggaaggcagagggttgaggcttcagttcacctccttctcatgagtgctgcagagtgtctgtgatgtcagaggtctgcagctgggctctgttcacccaggagtgtgcttcatgctctaggaaggagccactttgcacacagaagatccggggcccagccatccttccagggtgaacaattcatgtcttctctcatggtgaactctaggattcaagccatctaatgcttttgaagccactgtcattatatttaattgatgatgacaggtggccaccaatgatgaatattttcccagggggagtctccccaagtggcttcagacttcctcacatggccccaggggattaaatggctcctgattactcagaggataagaggttctgtcttatcatgttcctttcttatttgtcttatgtgtctttcctgccccaggcctgggatcccccactgatctcccttcccttagtgagaggtgatatttggagaccacattctggaggctccctcatgtcccccatttgaaaaagacaacggcagcctccaccctagctgtcccacccaacatgaggccagattcaggggtgcagggatgctcccaaggttaccctaacagatgtgactggcacttcatattgggaccagccaggcctcactgaccaggcctatccaactagaactactccagaaggtggggctgaaacccaccaaggttcccagaacactgcactctagggcaatcagcctctgcatgggaggagaggagcaccctctgcaccaccccatggtgttaccaaaagttgaaccatgggttggttcaactttgcagagaagagaccacctatcccatctgtggaaattcactccttagcgacactaatgccctctaataaattcaatcctgggcctgagtgatggttggtgcaaaaaacaaattcaagatcccagtgtcctccagaagcctggatttccagggatcctgctgtgggtcacaggatgtcaccggtcccctctctctgtgggttaagtgtgggggccatgtggactccctcatgagcagatgccaccaggaccactggccccagcttcctccttcacagctgcagtgggggctggggctaggggcatcccagggagggtttttgtatgagcctgtgtcacagtgttgggtgttcggcggagggaccaagctgaccgtcctaggtgagtctcttctcccctctccttccccgctcttgggacaatttctgctgtttttgtttgtttctgtatcttgtctcaacttgtggtcagcctttctccctgcatcccaggcctgagcaaggacctctgccctccctgttcagacccttgcttgcctcagcaggtcactacaaccacttcacctctgaccgcaggggcaggggactagatagaatgacctactgagcctcgtctgtctgtctgtctgtctgtctctctctctctgtttgtctctctgtctgtctgacaggcgcaggctgggtctctaagccttgttctgttctggcctcctcagtctgggttcttgtcggaacagctttgcccttgggttacctgggttccatctcctggggaattgggaacaaggggtctgagggaggcacctcctgggagactttagaaggacccagtgccctcggggctgatgctcgggaatcacagagctgggacccagagccaggatccagacccagaatgaggtaggaggtggaggggctgccctgggcgtctgggggctgccagggactgagccctgagccagcctgagactcaggaaaccccgtcaggagggagaagggagaagcagactctggacaccagaaagccaggggaagggtcacaaaaggagtggatgtgacggaagggcgggctcctgggtctcttcagaacatatcccctgtgcccagggggatcagaggggcagagtccactgcgtgaaagccccactgctatgaccaggtagccgggacgtggggtggatgccagaaaagactccacggaataagagagagcccaggacagcaggcaggctctccgatccccccaggcccttgccccatacacgggctccagaacacacatttggctggaacagcctgagggaccaaaaggccccagcatcccacagagctgaggagccaggccagaaaagtaaccccagagttcgctgtgcaggggagacacagagctctctttatctgtcaggatggcaggaggggacagggtcagggcgctgagggtcagatgtcggtgttgggggccaaggccccgagagatctcaggacaggtggtcaggtgtctaaggtaaaacagctccccgtgcagatcaggacatagtggaaaacaccctgacccctctgcctggcatagaccttcagacacagagcccctgaacaagggcaccccaacacctcatcatatactgaggtcaggggctccccaggtggacaccaggactctgaccccctgcccctcatccaccccgcaggtcagcccaaggctgccccctcggtcactctgttcccgccctcctctgaggagcttcaagccaacaaggccacactggtgtgtctcataagtgacttctacccgggagccgtgacagtggcctggaaggcagatagcagccccgtcaaggcgggagtggagaccaccacaccctccaaacaaagcaacaacaagtacgcggccagcagctacctgagcctgacgcctgagcagtggaagtcccacagaagctacagctgccaggtcacgcatgaagggagcaccgtggagaagacagtggcccctacagaatgttcataggttctcaaccctcaccccccaccacgggagactagagctgcaggatcccaggggaggggtctctcctcccaccccaaggcatcaagcccttctccctgcactcaataaaccctcaataaatattctcattgtcaatcagaaatcttgttttatctcattttttcttttctcacatataattcctagccttccctgggttctcaatttatggtggagggaattctgcacccagtgggaaagtcacccaagggaggaggcttacagcctccccgagtcatctctctggaaggtccttcctcttccagtcaccccttccccaactctccaccatacccctgagcctccagcctggcctcagctcagaccagtcccacaccctcctcaattttacttctcaataaagacctgatcatgtaaaacccagtttccaatgtgtcgtctgtgtctggtcatgtgcctgtgctgaagggtcactgctctgggacaggaggcagtttcaggtgagatcccatgtccccgtcaccccacaccccacccaacctgccaggaaaccgggtgagctccctgtgccagggggaaccatgttccagagcagaaagttgtccctgcagagtggtccctgaaatgcagttcttgcccacctgggaaggatgtggagcctagtgaggacagagtggtggccctgagcagggcatcggggagaaacgaggagtgttccaggaccccctgctttgggctagagacagaaaacccttgagcccaggccaagatcagagcagaaacagggttgaacttccctgtcccatccatgatacccagttaggagaccatttactaggtgccatcaccttacgttacattacaacattacgtgattgtgccatcacccgggagacatgaaaaaggctggaaaatggaacccttcagtgtagtttacactttcacaatgtacgttagctatgaaagatgctgacaagtcctgcagttggaaaacagttcatgttacataaccttgcaagtcaagaattctattcagtgtcccaacccacttagccctagagcgctcttcaagacactggtgttcatgtcactagtgctgggacatgggctgaggctgaggcacacagatgattcgttgtgatcaaatgggtcaggctcagggttaacactggccaggtcagaaagagagcatagggctgagatctcaaccatgaagagtctcgaattctaaagtcaggggacgcagtagagttagattatggttatggctggagccatgatggccagcctgtgtgagggtaggactcaggtggactgggtcaaatgagaaaggcaccatcccaagcatagaatcggcatccattggttgtctgatggaggctgtgtcaaaatcatactcgcccaagaatcagggccaggtcacactaggtcagggcagggtaagtgtgacttaagggctacaggcaggtcaagttttcatgggactcagctaccttagacccctccccaccagggcctactccctccctcaatcatgtggttcagcccctccatgtgcacctacaccctgatgtcagagacacaatcatcccagggtccctgacagcgagtgaggtggccttgggagatgcacttcccagccctcctcatcagtcttgggcactgtcaggccccttcttggtgcctccagcacatcagcggtgtggcaggtgccttcaccagagctgctgggtggccaggccaggcctgagacagagcctgcaagggcagagaactctagggccatagtggggcagagaaggggttcctcttggagcctaatcatagaacccctgcctcaagtcacaacctacaagttagaaggaaacttaagggtcctgattcccaccaccctgtctggccccatttcatagatgtgaacgctgagacccctatagcaaagaggaccgctttgatctccaccttctcaatggccctgctgggtaggatcccctctggatgtcccctggtgctgtcccaagactaatctctctaattactgccttgtaagatattacggaaactgacagcaagaaaataaaaaaacaggaggataatacagctcatgttgacccacccacaatcaagtaacctcttttacacagttgtttgaagcaaattgtagacatcatgtccattagtctaaatattccatttgtgtctctaaaaatatggacccccccaaaaaaactacattcttacaaacctaaatataaatatctaattctttcatatcaaaaaaagaatgtttcccatcaaatacttcacaaatatcctatgcttctttcactagacctgtgtttgtgttgttattctgtggttttccatttcatttctatgaggattcaatatggtttgaaattgtgactggtgactgtgtttttagacctgttctgtctgcaggtatcttcctcattgatttttaatttccttgcaaggcaggagctacaggagctgggggttggtcccaggaccttcccatggtcaggatacagcctgtggcctccccaagctggaaacaagcgctcctctctgcttctgcgtttcctgaaaattggttcttggccagaaaggtttaacaaggctcagtgtgacttttcagcaagaccgcttggctactgggctcccatgtggggtcatctatttgtgacgttagctgggcttcacactttgtatccagtgccattagatggtatatggatgcaaggtgactgcatttcagttcgaccaccttttccttctactgactgtctgtaaaaggtgtgccctcatatgttctttgctcctctgggagtgtgattcttatttcagtaagaaatagcatagacatgttgagtctttcctttcatttagcatcttaataatgatgaccatgttgcctgccatctcgtgaagatgaacaattatttcatggtgagctcaaagttatgttactgtatgtgactcacttgagtccaccatggttctattttattgatgatgacaacgacccaccgtggcccactcagtgcctcttctggtggccccaggatcctcctgaaggaacccaggagacctcgatggctttccactctctgttcacaatctatcctgggcacatctttctcctgccttgtgcctggaattgcccattaaccccaagtggactagtccccataactgggaggtgggatttagtgaccacacttggggtgcttctcacacagcccttttgagtcagacactccagacatacccagaaatgagacaagaccctgaaagggtaacaggggcttgcttccaacttctccctggaggttgaggctggcatttcatactaaaacctagtgagacccatcccaaactaagacaacacaaggaggacggaagtgagacgccctggagttgtggttgtggtcacgttggagcttcccatgactgctgactctggggcaagctgcccctcctctaaggcactcactggggacacctgaggacgcctcctgctcttaccctgtagtcacaccaagagatcagggttacaacaaccctatagagaatccctgtccccttccatgtcacttcactccttcgtgaagcaaatgccctcaaggagctcattcccattcctgggtcacagtcacctggaaaacctgatccagacaccaacctcctcaggcctcgccatttccagacgtcccgttactgcatacgcttggtcgactgtcccatctcagcttgagaagggcaggcaggtgtgtggactctgctgagcaaatgccttccaggggcagtggtctggcttcctgcaccatagcttcaggtgggggatggggagggggagttaggggccccagggaagagtttttgtatgaacctgtgtcaccgcattttgtatttggtggaggaacccagctgatcattttagatgagtctcttcttccctttctttccctgccaagttggtgacaattttattctgatttcgatctttgtctgtgacttgccacagcctgtggtcagggtttcctttgggacctcggtcctgggaggctgatctctctcctccctattcagacccctgtatgcctcagctggtcactgagacaccttcatctcctctgaccccagaggcagggagctccaagacaaggccacactggtgtgtctcatgagtgacttctacccgagagccatgacagtggcctggaagatagatggcatcaccatcacccagggtgtggagaccaccacaccctccaaacagagcaacaagtatgcggccagcagctacctaagactggcacccgacagtggaagtcccacaacctctacagctgccaggtcacgcatgaaaggaacactgtggagaagacagtggcccctgcagaatgttcttaggtccccgaccctcacctacacacgggggcctagagctgcaggatcagggcatgtgtctcccctcccactccaagtcatccagcccttctccctgcacccagtaaccctcaataaatatcctcattgtcaaccagaaatcctgctgtctgtcttcatttcttatctcatatttagtttgcaacctccttaaattctaagcaaggatgaggaaaatccaggtgcccagtttatcgggtgagaagtccatggtggtgccatcaccaggaacttgtggaaaggtctgggaatggaaactcacaggtgaatttcacagattttcacaatacagggtggctaagtaaagacacttacaagtcctgcaatagggaaacaggaagtccagaatcctgctcaccatcccagccaacttagtgagccctaggatgctctgcaagatactggtgttcacgtcgctagctctggaaagtggggtgaggctggggcacacgggtgatcagttatgatcagatgggcttagggtgaggttcaaagttaaccagcacgtggctgagatctcaaccatgaagttcccaattctaaagtcaggctctggggtggagtgagtatgtgcttggtgtgtggctgagcctgtgatggtcagctcgtgtgaggggaggactcctgtggactgagacaaatgagcaaagacaccatcccaggcacagaacgggcatcccatggttgtcggggagagtctgtgtcagagtctcattctggactagagtcaaggctgggtcacgcaaggtcagcacagggtgaacatgacctaggggctatctataggcaaagtcaggctttcacgggatctcaactgccccaaacacccccatcccaccaggccccactccctctgtcactcacgttgttccgtcccctcaccccctgcaccatggtgcaccggcagcctcactcagagacaccctcatcccggggtccctgacagtgggcaatttggtcccttgaaggccttgacaggctcggttaatccatagtgcccgggctgggacccccactgtttctggttcatcagggacatggcagcagctgctgggtggccagccaggacaggaacagagctgcaaggcctgggggctttttccacaatgatacacaaagagaggggcccctttggagctcagtcccagccacccctgccccaaatcacagccgtgagctgaattgaatttcaggtgcccagagtccctcagcctctgtttgacccatttcacagctatgaaaattcaagcccatgggagacactgtcccaagcttcaccctctctataagttgtacatttttatgatgaagatctctgaacacaaaaatagggagacagaagaatagtaatgactccaaggttcccatcagccagtccgcagcatcatccattttcagataatgcggacccacccacagcagaataactaaactactccttcaagcaagggtgtgaagcaaatgctagtcatcacacacacaactggagagaatatcaaggatttcttgacatcaaaaatagttaatgagagtcttatcaaatgtcttgtgaatatcattgtgtctatttttgtcgactttgtggtgctgttgcatatttgtgatttaatttcatttctatgtggattaaatacttgacgttatcattggtgaatgtgtttttagacccattccatctgcaggtgtctcccaaattgctctagctttccctggcaaggcaggagctgcaggagcagagagctggtcccgggacctcccacagtcgggatgcaggcgccacctccctgagcaggaacccagtgcttccctcaacctctcttttcctgaaaaatggttctagcatcaagaggctcaagggggttcaggctggacattggcaaactcgcttcccaggacacgtggctacttccagcaaagccacccatgttgtgttgtcattctttcagtgacattagctgcatttgatgatcaataacttcgcgcctcagatgagaaggaaggcagatggtcaagacttcggtccacctccttctcatgagggcttccagaagggagggcacagcagctgcaccgtgcgctcaggagtgtgcttcatgctttgggaagaagaaaaaatgtacattcttcccttttgttcaccactttgataactgatgatctggtgcccagccatcctccagggcgcacagcacaatgtagtaccggagtgagctctagcgtgtgaggacatctgacatgtgggctccactgcagatatactgaattgcaatgacaatgcggctacaaaacataaacatttacccactgggcgcctcctcaggtggcatctgattttctcccattgccccaggagcttccatggctcctgatttctcggaggatgagaggttctgtctcatcatgtccctttcctgccccaggcctgggatcccgcactgacctcacctcccttagcagaaggtgatatttggagaccacactcgggagctcctttatgtccctcacatttgaataaggcagtggcagccactaccccacctcacccaccaaaatgagaccaggttgaggggtgcaggagatccttccattttaccctggaggatagggctggcatttccagtggggaccagccaggcctcactggccaggcccatcccaactaggacaagcccagggaaggctgggctgaggctcctggagtcacagataggttcatgggaagcttcccaagacaccgcactctagggtaaccagcttcttcctggagggagagggcactctctgcatcaccccagggcgtcaccaagcagtcagtgtcgagtcagctccaccagggagaccatttatccctgaccatgggagttcactcctagtgacacagtgccctccaataaactcatccccatggctgcatgatggttggtgggaaaaccaaatccactgtcctccaggaaccaggatttctagggatcctgctggtcacaggatgtcacctgtccccttctctctgtgggggtgagtgtggcagccgtgtgaactccctcatgagcagatgccaccaggggctgtggcctcagcttcctccatcacagctgcagcgggggttgggggtagaggcgtccagagagggtttttgtatgagcctgtgtcacagcactgggtgtttggtgaggggacggagctgaccgtcctagatgagtcttttccccctccttccctggtctccccaaggtactgggaaattttctgctgcttttgttcttttctgtatcttgtgttgacctgtggtgatgctttctctctggagcctaggccctggtcaaggacctctcccctccctgtttagacccttacctcagtgggtcaccaagaccccttcacctctgacctcagatgtagggcactagactggatgacctactgagactcatctgtctgtctgtctgccagagccaggctgcttccctaaaacttgctcagttctgtcctcccccacctgggcttctgtctaacgaactttgtgcaagggaaactgaggccccatctcatgagggagagggaacaaggggctcgaaggagtgaccacctggtggactttagaaggacctgaaaccctcagagccaagataggggaatgaaaactcagagtctcagggcccagtcccctggactgtgggactctggatccaggctgggaacaaggtaggaggtgcaggggcctctccaggtttctgtgggctcccagggagagagccctgagctggtctgggacccatgaagccctgtcaggagggacgggaaggctctggacatgaaggagccaggtgaagtgtcacgaaaggccatggcattcagggaggtggctgatgggtctctgtgggaggcacccctagaagcaggaacccctgagttcaccgacaggcatatcccaaggcagaaaaactgtagattggccctaaacacagagagactctaacacagactccacagacaaagagcccaggacagacagacagtgggacttgggtgagcaaaggccctgactccactgcagaagatccaggagagacggatgtgggtacaaacagagttcttacgtgagagacccactctcccccaacccagagcagctgtgtcaggtgagaaaagtttccagagtgaatctaacaagaggctcacagagctcagagaacacagccagagccggatcacgtcaggatgacagggtgaggcagcgccaggcaattgaaggtccactgtctatacaaaagcccaagtccttggaagatttccaaacaggcgatgggcaggggccaagctcagaggttttctgactgacagagttcttttaggaacatgatgtcacacccttctgagacagtgtggaccacatctgagaggtcctgcactggtactggggggcctgaacactcctcatgcactgaggtcaggggctccccaggtggacaccaggactctgacctcctgcccctcatccattctgcaggtccgctcaaggccacccccttggtcactctgttcccgccctcctctgaggagctccaagccaacaaggccatgctggtgtgtctcataaatgacttctacccaggagccatagaaggaaaatggcaccctagtcaccaagggcatagagacaaccacaccctccacacagagcaacaacaactatgcggccagcagctacctgagcctgacgcccgagcagtggaagtcccacagaagctacagctgccaggtcacgcacaaagaaagtaccatggagaagacaatggcccatgcagaatgttcttaggcccccgaccctcaccccacccacaggggcctggagctgcaggatcccagggcagaggtgttccctcccaccccaagtcatccagtccttctgccgacacccaataaaccctcaataaatgtcctccttgtcaatcagaaaacatgctgtctgctcatttttgtttatccactttccatcctaaatttttttatctccaaagatcaacagaatcctttggacttgtgacaatgcagcctgggaccatcttcgtgtttctctgagccgtactttttccatcaccttatccccatagaatgttccagaacaaggaaatagtcttcagaaggaaccagacatcttcattcttacccacgtctctgttgtgcttcctgctgccctgtgagcacgtccacctctggctgcccggggacacaccctccttacatccctatggccccgggagaacatctcagctcccttctttgttgtcctcggccctcactgtccagatgccatccctctctcaaggtgtttgtccatccccctccaaggccatgtggtcaccccacctgtatttcccctcatcaaagcctagagcatctccccttctccatgggcacactctgttcccgtcatcccagggaccctgccctcagcccccacaggccctccctataataatcactgatgggatgcttaccccctggaccctggtcactcaccccacatccccctctgggtgcctctcatcccacatgtgtcaccggatgccccagctgtattcaacattcctaggggacaagggtcggctctgctcctcactgacaccattatgaatgcctaatgtcctgctgtgcacaagttgtcaattgactggtgagttcaaagtcagattctggggttatgccaggagcttgggtgacgctgattcttcttctgaagaactcagcatgggatctgagctataatacacacacacgtgtacacacacacaatgcacataaacacacatgtccatgctgggcatccttctgggaggatcaggaaggtagaaggggctgcagtcaggcccaggtcaggacatgagcaaagcaaagctgagacctgctgtctccaggctttgggactagggggtcgcccctggatatgggagggtggggcagggttttctgtccaggccaagagggagacaggagaagatgtggacgggattctgatcagggagcagcaggccacatctcagcagtcaggggaggcgcttgctgtggggaatactgttggggactgcatggtgccaggagtgtgtcccaggtgtgagctcttcaggtgatgggcccagaccaggatgcaggtccaggctgtgtgtgtccaggccccacactgcacatgcccatccactgtgggtgccccccgtgccggtgacactccagagcacaggctgtgtgggtcacccgtgcatgtaggggactgcagagcacacacatgtgggtgtgtgtgtaagccgggggagctgaagtggacagcagagatcccccacacgtagagctcctggaggaaaccacactgccagtgaggcctatgacctcccttgagaagctctcctctgggccattgcagctctaatccagcacacatggcctataggtaggaagctgtccccatgggttcaggaggcggacttgggcagtgatctgtgagctgctccttcaggacagctgggccaaggatgctggagctcagaccttgcagtggggtctgtgtccctgtggtcaacgtcattcttcccacaacccccaattcccattccaagcccatcccatcataacctccagtgctgaggatgtggggggcatcaaggaccctccccaccattcccaacttctcaaagaggtcccagctgcaccatgtcagtggcgtcacccagccgctcacctccccttcctccctggcattcctgacaccagctgatccaggccacccaactcctcagaaatgcaattacctgggagacaattccacacacagacctgtcaacccttcccatgactgaggtggatgaacccctaagcccccaaggaagtgatattcaggtcagtagaaggtgacccccttcaccccacctatggctcacccacccatgagaaaagggggctggaccctgggccttgtgagcagctgcagggggttggggggcggggtggcctgggtcgggtgtatcaggagggtttgtgtgcagggttatatcacagtgtaatgtgttcggcagtggcaccaaggtgaccgtcctcggtgagtccccttttctattcttttgggtctagggtgagatctggggagacttttctgtcctttctgttctctctagggtagaggtctcaatctctctggggtctgccaccattgccttttttcctggccccaatttcctccagcctgtcccttcttaggcacctggtggggcatgatgggaagatcccagtgacctcttaatgctccctgctcaggcctgaacctgccgctgtcactcagggggcattctcccctgggctctgggatgttctgctccctcgcacagagtctccagtccccaaagaccagcagagcaggggctcaggctggggcaccagggccatgggacaggggaaggatgctggaaaaagttcagcttcccagggttctgggtcccaactatggggctgctttaaacaccaagaagggaggcctttgactggggacttggggaaatgaagggggacaaggatggaggaagaatgtcctgtgaggtggcgccagggtgctgggtccctcctcctcccccgggacaggcaggctgccatagacagggtggttctcaggacactcagtccaaggttagagcctccccatcccacccaaaaagagagacccccaaagcagatgctgagggaggcactcctggtgggcgcaggtgacagggacctgtcaggacagacatttgtcctaggacagccagatctcccaacgacagggagaccccatagagcagacacagcgccaggctcagaacagaaaatatacctcacatgcaagccctccatctcctggactcccaggacccggctcccaggactgacatcccctccccaccaaggggcctctgtgggaaagtggggcagagactgcaatgatggtgctgggggatatgtgaggaagaaattcacttgtcaaaagggaggagaacctaaaaacaggacacagatgccctcgtgaacagacccagaggagggacctggcaggggatgttcagacagagacgtcccccaaggaaagacgagggcccagggctgaacccagccagcgtcggggagcataggtgaggtgagagctggctgataaggaggggagaatctggagaggaggctggagcagaagaggcctgattctcctcagtcctcagatgctgaggagtttcccatcaggaggtaagcgtccccgccaccgccaagttgacctcagtacagcaagggcccagcctgaggtccctatcctgggccttagtccttcacccacctgaaaactgaggccaggggctccccaggtggacaccaggactctgaccccctgcccctcatccaccccgcaggtcagcccaaggctgccccctcggtcactctgttcccgccctcctctgaggagcttcaagccaacaaggccacactggtgtgcctgatcagtgacttctacccgggagctgtgaaagtggcctggaaggcagatggcagccccgtcaacgcgggagtggagaccaccacaccctccaaacagagcaacaacaagtacgcggccagcagctagctacctgagcctgacgcctgagcagtggaagtcccacagaagctacagttgccaggtcacgcatgaagggagcaccgtggagaagacagtggcccctgcagaatgctcttaggcccccgaccctcaccccacccacaggggcctggagctgcaggttcccaggggagggggtctctctccccatcccaagtcatccagcccttcttcctacactcaataaaccctcaataaatatcctcagtccaccagaaaccctgggttttgtgttttgcttctgtttatacattttctaccctaaattggtccaacctgcaagatgaacaaaattcttttagccttgtgggaatgaagtctggattgtttttgaggggtagttccaccatcacctagaaaggcccagagaatattccagaacagagccttgggcagcaggccccaggactgcccctttcccatacgtgctgtgtttgtgtggacatgtccacctccagcggcctggggcgaccgctccttggttccccatggcccagaagaacgagtaccctccacggatcatcaggcctcacccctggacagcctccctctctcaaggggtccctccttctgaggcggaaggagcctctccagtccatgggcccttggtctcccctactccttaggggcccaccctgttcctgactcccaggaccctgccctctacccccacatctatctctgaagcaggcacagactggaccctgaccctctggacccaggtcactcaccccacaggccagctgggtacccctggtcccacatgtgtcaccagtgtcccagttatactcaagtcccctgggggataagggtcaactctactctctctcacccctaagtaaccagcccaaaactgaccacacctcaagtacctaatgtccagttatccacggatggtcagtggggctggggaggtcaaagtcaatcatgagattccagagtggtgccatagacgtgcctgtaaaccaattggtctttttaagagctgtatgtgggatctaagaaccgggttgatgattgtcccaggaggtagcacaggatggggggcctgggctatgagacaaacacacatacatacatgttcacaaacataaacacacatgaacacctcataggcacacaggtattcacaaacaaacatgcctgcatgcaaatacatacacacacactctcctgtgctatttagaatcattaccacatgggcatcccactaggggctgtgctgggcatccaggaccctcccagggaactcggatctccataggggaccagctccaccttccctgtggcataaacaggcttctcacttcttccatggtgacagtctccaaaggagctgagccgggacacatggcttcctccaggacagagagtagcaggggacccagatgtgatgtgcagacatgcctcctccctctcccctctccctctgggggtgaagggatccctgacttccagtaaagtgtgcatccatgcatggaggggccatccccctcaccctcctatcggccagacctgcttcatgacagggccactggacctgggcgcccaagctgctgcagcggggaacgggtcgggtgtgtcaggaggggtttgtgtgtggggctgtgtcactgtgtgctgtgttcggaggaggcacccagctgaccgccctcggtaagtctccccgcttctctcctctttgagatcccaagttaaacacggggagtttttccctttcctgtctgtcgaaggctaaggtctaagcctgtctggatgtctggaatctttgcccctccttgcctgggctcctgccctcttctgtgattctgtcctctgtgggtcccagttacggggctgcattaaacacagtgacaggaggcctttgactgaggacttggagagatgggggaggaaatggcaggaggacaaagatagaggaagaatattccgtgagaaggtggccccacagcgctgggtcacacgccatcccccaagacaggcaggacaccacagacagggtggtgggtctcagaaaactcaggccctaaacgtggatgcttaccaattcctccactggaggaagacctcagagcagatgcccaggacagggacttctggtagggacggtgactgggacgggtgcctgtttgtcagggaaaacccactggagagtcagatcccccagataacttctcacgacatggagactctttcgaacagacaaagctccacgttcagctcagggagtaaaaaaaaaatgcctcaaatggaggcctttgatctactggaatccagcccccaggactgacaccctgtctcaccaggcagcccagaggggtctctgcagggaggtggggtgggggctgcaatgatggcaccagggagatgtgtgggtaagaaacccactccctgtgagagagaagagcctgaacccaggaccaacagctgccctgcatgaagagatgagaacaaggggaactggtaggaggtgttcagacagacacccccaagatagacaaatacccagggtgagatgtggtcctggactccatcccatccagtgtggagccagcaccggtgggggtctataggtgatggaaaatatgaaaaagagacagatccaagagggggtctgtgacccccaagagtgggggcaactcccatctgacagcgagtgtctccactcaccgctgacctgacctcagtccagcaagggtccggcctgaggtccctgccctgggccttagtcccatacccacttcaagactgaggtcaggggctccccaggtggacaccaggactctgaccccctgcccctcatccaccccgcaggtcagcccaaggctgccccctcggtcactctgttcccaccctcctctgaggagcttcaagccaacaaggccacactggtgtgtctcgtaagtgacttctacccgggagccgtgacagtggcctggaaggcagatggcagccccgtcaaggtgggagtggagaccaccaaaccctccaaacaaagcaacaacaagtatgcggccagcagctacctgagcctgacgcccgagcagtggaagtcccacagaagctacagctgccgggtcacgcatgaagggagcaccgtggagaagacagtggcccctgcagaatgctcttag

SEQ ID NO: 320 - DNA, 38 bp, Homo sapiens
ttgggtgttcggcggagggaccaagctgaccgtcctag

SEQ ID NO: 321 - DNA, 914 bp, Homo sapiens
tgtggcagatttcagaggcccttaaaatgaggccaagtgaggtggacaggtccgagccagctgaggactcctcagccacacggcacagctgcctgaggggatgtgtcactcagggagttgctgggacctactgggcccagcgttgccatcagcaccaacagcttcagagagggggacacatgccggggtgactccaaggctgtgggcggcacctgcctcagatagagaacaggcacagagacactactgggggacactactgggacactggccacccccctaccctgtgcctagatcacagcctacacactgcagccctgtgcccctcacacccagcaggttcctgctccagcgcggctcctggactggccccgggtgctggccccgggggtttcaatccaagcataattcagtgaagcatgtgtttggcagcgggacccagctcaccgttttaggtcagcccaaggccaccccctcggtcactctgttcctgccgtcctctgaggagctccaagccaacaaggccacactggtgtgtctcatgaatgacttctatctgggaatcttgacggtgacctggaaggcagatggtacccccatcacccagggcgtggagatgaccacgccctccaaacagagcaacagcaagtacatggccagcagctacctgagcctgacgcccgagcagtggaggtcccgcagaagctacagctgccaggtcatgcatgaagggagcactgcagagaagacggtggcccctgcagaatgttcataggttcccagcccccaccccacccacaggggcctggagctgcaggatcccaggggaggcgtctctctctgcatcccaagccatccagcccttctccctgtacccagtaaaccctcagtaaatatcctctttgtcaaccaga

SEQ ID NO: 322 - DNA, 1429 bp, Homo sapiens
tgagcatctttgctctttttgctcataagtgaaacactccaaagtcatttgccaggatcccctgtagatgggcattcagtgtacagactcctaggcaagatccctggtcacagtatccaaatgactttgactgcaaacctggggaagtagagagagaacaaagatttaccagaaaaaccctctgggaatgtcttcccaaggcaccctagagggaagagctccctttctcttcagctccacaggatccacagaggaaggagagctctagccagcaggaaggagccacatgagaggagaggaccaggtgtcccacacaggtggggaagtgagtccatggggctggtccccgctctgggcttgatcctgacataagaggactctgtgtagacaccacctgagtcctctgcaatgtacagccacagagccatggacagattcactcctgaggagtccagtagagcgcgaagactgccttgaggtcacagcgggaagacacaggtgtcacttgagctggcctggacctgagagagggggcagtggacagaacagaggggaggcagtggtgtgaatgagaggctctggtcaccttatcatagaatggtttaccttggctggacaccaggggacgctgggggaccatttctgagaagacgcgcggggggcgggggtgggcggtgatgggagcacaaccggccacctgttgtgcctgttgtcctctgctcagggctcacaactgtgttctccccaccctctgggaccacagagctccacccctgccacaccctgacatcctcaaggcaaggagcctgacccagggctcagggtggggtcacaaagctgggggggtctgatttgcatggatggactctccccctctcagagtatgaagagagggagagatctgggggaagctcagcttcagctgtgggtagagaagacaggactcaggacaatctccagcatggccagcttccctctcctcctcaccctcctcactcactgtgcaggtgacaggatggggaccaagaaaggggccctgggaagcccatggggccctgctttctcctcttgtctccttttgtctcttgtcaatcaccatgtctgtgtctctctcacttccagggtcctgggcccagtctgtgctgactcagccaccctcagcgtctgggacccccgggcagagggtcaccatctcttgttctggaagcagctccaacatcggaagtaatactgtaaactggtaccagcagctcccaggaacggcccccaaactcctcatctatagtaataatcagcggccctcaggggtccctgaccgattctctggctccaagtctggcacctcagcctccctggccatcagtgggctccagtctgaggatgaggctgattattactgtgcagcatgggatgacagcctgaatggtcc

SEQ ID NO: 323 - DNA, 7309 bp, Homo sapiens
gctccgcccgggcgagtagtgcaggtgccgctgcgccggggccggggaggcgcgcgccgagccgagcggagcctaggagggatggagagctggccacccgggctgcaggagcaccggcgcggggcgtaggcggcgcgaggcgggcgcgaggcgggcgctcgggcgcgaggcgcgtgcgggcgcgggagcactttgcgataggatgaggctccgggctggcgcggtagtactatgatttggtatgtggccactttcatagcaagtgtgatcggcacccgagggcttgcggctgaaggcgcccacggcctgcgagaggagcccgagtttgtgacggcaagagctggggagagcgtggtcctgcgatgcgacgtgatccacccagtgacgggacagcccccaccctatgtcgtagagtggttcaagttcggggtccccatccctatcttcatcaagtttggctactacccgccgcacgtggaccctgagtatgcaggccgggccagtcttcatgataaggcatctctgcggctggaacaagttcgctctgaggaccagggctggtatgagtgcaaagtgctcatgctggaccagcagtatgacaccttccacaatggcagctgggtccacctcaccatcaacgcccctcccacctttacagaaacacccccccagtacatcgaggccaaggagggtggtagtatcaccatgacctgcacagcttttgggaaccccaagcccattgtcacctggctcaaggaggggacgctcctcggtgctagtgggaaataccaggtgagtgacggcagcctgacagtgacatcggtcagtcgggaggacagaggtgcctacacctgccgagcgtacagcattcagggggaggctgtccacacgactcacctgcttgtccaagggccccctttcatcgtctcccctcctgagaacatcaccgtcaacatctcccaggatgctctgctcacctgccgggcagaggcgtatccgggcaacctcacctacacctggtactggcaggacgagaacgtctactttcagaacgacctgaagctgagggtgcgcatcctaatcgatgggaccctgatcatcttccgggtgaagccggaggactcggggaagtacacctgtgtgcccagcaacagcctggggcgctccccctccgcctcggcgtacctgaccgtgcagtacccagcgcgtgtcctcaacatgccccctgtgatttacgtgcccgtggggatccatggctacatccgctgccctgtggacgcagaaccaccggccaccgtggtcaagtggaacaaggacggccgtcccctgcaggttgagaagaacctcggttggaccctgatggaggatggctccattcgaattgaggaggccacagaggaggctcttggcacttatacctgtgtgccttacaacactctggggaccatgggccagtctgcccctgcgaggcttgtcctgaaggaccccccctatttcacggtgctaccaggctgggagtacaggcaggaggccggccgggagctacttatcccctgtgctgccgcaggggacccctttcctgtcatcacttggagaaaggtagggaagcccagcagaagcaagcacagtgccctgcccagtgggagcctgcagttccgtgccctgagtaaggaggaccacggggagtgggaatgtgtcgccaccaacgtggtcacgagcatcactgccagcacccacctcaccgtcatcggcaccagcccccatgccccgggcagtgtccgggtccaggtctccatgacaactgccaacgtgtcctgggaaccaggctatgatggaggctacgagcagacattctcagtttggatgaagcgggcacagtttgggccccatgactggctgtccttgccagtgccgccaggacccagctggctgctggtggacaccctggagcctgagacagcgtaccagttcagcgtcctggcccagaacaagctgggaaccagcgccttcagtgaggtggtcactgtgaacactttagcattccctattacaactccagaacccctggtgctggtcaccccaccgaggtgcctcatagccaatcggactcagcagggtgtgctcctgtcctggcttccgcctgccaaccacagctttcccatcgaccgctacatcatggagttccgtgtcgcagagcgctgggagttgctcgacgatggcatccccggcaccgaaggagagttctttgccaaggatctgtcacaggacacgtggtatgagttccgggttctggccgtcatgcaggatctgatcagcgagcccagcaacatcgccggcgtctccagcacagacatcttcccgcagccggacctgaccgaggatgggctggcgcggcctgtgctggcgggaatcgtagctaccatctgcttcttggcagctgccatcctgttcagcaccctggctgcctgctttgtcaacaagcagcgcaagcgtaagctcaagcgcaaaaaagaccctccactctccatcacccactgcaggaagagcctggagtctcccttgtcctctggcaaggtgagccccgagagcatccgcacgctccgagcgccgtcagaatcctccgacgaccagggccagcccgcggccaagaggatgctgagccccacccgtgagaaggagctgtcgctgtacaagaagaccaagcgggccatcagcagcaagaagtacagcgtggccaaggcagaggccgaggcagaggccaccacgcccatcgagctcatcagcagaggccctgacggccgcttcgtgatggaccctgccgagatggagccctcgctgaagagcaggcgcatcgagggcttccccttcgccgaggagacggacatgtaccccgagttccgccagtcggacgaggagaacgaggacccactggtgcccacatctgtggccgccctgaagtcccagctcacccctctgtcatccagccaggagtcctacctgccaccaccagcatacagccctcggttccagccccgcgggctggagggccccggtggcctggaaggtcggcttcaggccacaggccaggcccggccccctgccccccggcccttccaccatggccagtattatgggtacctcagcagcagcagccctggggaggtggagccgcccccgttctacgtgccagaagtgggcagccccctgagctccgtcatgtcgtccccgcccctgcccaccgaggggccctttggccaccccaccatccccgaggagaatggagagaatgcatccaacagcacgctgcccttgactcagacacctacaggagggcgctcccctgagccctggggccggccagaattccccttcggggggctggagaccccagcgatgatgttcccccaccagctgccaccctgtgatgtgcccgagagtctgcagcccaaggccggcctcccccgaggactgccccccacctccctgcaggtgcccgcggcctacccgggcatcctgtctctggaggcaccgaagggttgggcaggcaagtcgcccggcaggggccctgtcccagcgccccccgccgccaagtggcaggacagacctatgcaacctctggtaagccaagggcagctgcgacatacaagccaaggcatgggcatacctgtgctgccttaccccgagccggctgagccgggggcgcacggcggccccagcacatttggcctggacacccggtggtatgagccccagccccggccccggcctagccctcggcaggccaggcgcgccgagcccagtttacatcaagtggtgctacagccctcccggctctcacctctgacccaaagccccctcagctcccgcaccggctcccctgagctcgccgcccgtgcccggcctcgcccgggcctcctgcagcaggcagagatgtcagagatcaccctgcagccgccggctgcagtcagcttttctcgaaagtctacgccgtccacaggctccccctcccagagcagccgcagtgggagtcccagctaccggcccgccatgggcttcaccactctggccaccggctacccttcccctccacccggccccgcccctgctgggcctggggacagcttggacgtgtttggacagacgccttcccctcgaaggacgggggaggaattgctccgaccggagaccccaccacccacgttacctacttcagggaagctgcagagagacagaccagctcccgcgaccagcccgcctgagagagcactctctaaactgtagcagctggtattccagctatctgggcagtgttgtcgagacaagcctctcctcagctcaataggtaagggagctcctcggctgggcgggcgggggcgggcaggcggacggggcttcggccgggccattgcttcctggacaggggatccaaaccatgtcccctcaccgccccgtggggtggccgctgccgctcctcgatccccacggcttctgggttccccacatcgagccacgctcggcaccgcctagctgcagcttctgccccccaccccccgtccccatgtccggcccctctagagccccctgcggctctcctcactcctcgccagcctcgccagcctgctgccagtacacccagggcctcccacagaagccctggggccctgcatgcaccccgaaggggcccagaacacccgagatctgctttgcatctctgcacccttggggacctctctggggcccctctggtatccaggaagagcccccccgcaccctattctcccagcagccccaggcatagcatcccttctcctggggtggctggcccctcaccagcttcttgagatcttcgtggtattaggctctctcgaggagtacaaggttgggatgagccccacttcttccttgacagtggggtcctctgcagggtcaggtccctgcagtcctatggggctttgtagcgaaatgtcatcactcccctgtgctccttgccttctgcagcctgaccttggtagtcacaggactgaaatgtgacctagcccttgggtccacattgctttcaaggtccctgttgtagccttgtcgtcctccctgggtcatgctgtagggaaagggtcttaggaggacctccccgaggggagggggcaggcttcccctgggcagacaggcattgagctggcaggaagtgaaacccccagggaccagcactgtgtccctccccctgcccccgcagtcagcctctccttgagtgtccttccaggtggaagctaaaggaacttgggcattcagggagcctctgagtccctcacagagactcagggccacccgaagctcgctccctctcacagtagcctgacaaggtgctgccgctcgccacggaccctctgccctgtgcctgggcacacacaggcatcgggcacctgcatgggagacggcgagcctcccgtccaggtgcttctggctttccaggcgagaaggagacaggtgccttccccccctagagatgtcaagggaggttcactttcctaaccagggctataaatctcattcattcctaagagtggcctccataaagaggactgccctgacatttctttaccatctgtagctataaaattgtcagcagcccagaggccctggaattgtgggtgaggctgtctggcatagggtgagtgtgagggctgtcaggcagcgtttatgagctcacctgctctggggccctcctgcgcccagagacccactggtcttccaccttccccagctccctccctgtcccagctgtgactcctccacagcccccggaggtgtgggagccctagactagctctcaccccagctcctggaaattcctagactctgctctcatgtgttattcctcaccccttcactcaactccattgaccctctcctttcccagtgtccccactgtgccagatccaagagaagcccgctctcctttcactgctgtggcaaacccagaaaccaggggcagcgatgagggaccatcgtttctctcccgggcctggccagcatccccagcctaggagaaggagaccctccccatcctgagtcagcccctcggtgctggcctctcctgcctgctgggagcctccccggtacggctgctgggtcctggggagatgcaggctctgttcagatgctgtctccatgctgcacctttgcatgtgtgccctcttggtcttgcttggagaagttgtgacagctcttgtccacgtgcgttctcactgtttcttttcccttcagttcctctcctgttcctttggtccatatgtagttgttgcccctgcctctcctcctttctctctccctttttttctcctcttcccaactcccttctcaacatggggagttgtattgcgtggacctgtcctttctgtggactgtggggaggccgagccaattcttagctcctgtctgagcctagtgatgccctgtcctcacctctgcttccactccctttcccattcaggctgactgtcaccgcagggaggcaggtgggtctggagcatggagtggcccctgtcctgggtcagctgtaggaaggggcccctttgtaaacaagcttctgccaggttctgaggcagagcactggtctgagtccggccccacagaagggttccatcttgtggtcagcggggtgggctcagacctgcagactcccgcagtgggcccaccctttcccttgctatggcccgtctatgagtggctttcccctgcctccatcggtgtataatcaggcaggtggtgtttgctcttaggtgattagaagaggaggaaaatgcccatcaagccactgcttcagcctgttggccagggaacacctgaacagggtcaaaatggtcagctcctgggcgctgagctaaggaaatatgcagggggttttgactttccctgtcctgaggcttgcctccactttgacctggctgcatctttcctcagctcttctgggtaagctgagagctaagcaaataagacctcctgggctacctggtcatgatttgggttttgtatggattttttgaaaagagagaaaaagagtgtgggctgggtgccgtggcccagagggcagatctcttgagtccaggagttcaaggccagcctgggcaacatagtgaagccccatctctgcaaaaaaatacaaaaaaatagctgggcatggtggcacatgcctatagtcccagctccttggggggctgaggtgggaagatcatctgagctggggaggtcgaggcagcagtgagccgagattgcgccacttcactccagcctgggtgacagagaccctgtctca

SEQ ID NO: 324 - DNA, 2636 bp, Homo sapiens
ggagagaaatggctgaaagtggaaacccggagcggtttggggcgcttcgcaaagttctccagctcggcgagccggcggtgtgtctaccagaggctgggggccagtccatctggtcctgcccgacgccacttccaccccgcgagctctgggaaaggtctctacgtgacgccaagggccgtcgcggccccggggagagggatcgaaagactcactctgcgaggtgtttacactggaggtgggggacgggaagggactgggcaaagttacctggactcaactaaattcctgcgcttgcttagtgttgacatttgaataggatccgagatgttctgcttttatcccgggcagccctgatatgtcagcaacaggctgaggttccagacctgaaatcgcactgcaagaaaaaggggtttgctgaactaactccaagctggtgtgcctagcgtccgcgcggctgccggcccaagagctggagtcaccatggcggccggagttgcggcctggctgccttttgcccgggctgcggccatcgggtggatgccggtggccaactgccccatgcccctggccccggccgacaagaacaagcggcaggatgagctgattgtcctcaacgtgagtgggcggaggttccagacctggaggaccacgctggagcgctacccggacaccctgctgggcagcacggagaaggagttcttcttcaacgaggacaccaaggagtacttcttcgaccgggaccccgaggtgttccgctgcgtgctcaacttctaccgcacggggaagctgcactacccgcgctacgagtgcatctctgcctacgacgacgagctggccttctacggcatcctcccggagatcatcggggactgctgctacgaggagtacaaggaccgcaagagggagaacgccgagcggctcatggacgacaacgactcggagaacaaccaggagtccatgccctcgctcagcttccgccagaccatgtggcgggccttcgagaacccccacaccagcacgctggccctggtcttctactacgtgactggcttcttcatcgctgtctcggtcatcaccaacgtggtggagacggtgccgtgcggcacggtcccgggcagcaaggagctgccgtgcggggagcgctactcggtggccttcttctgcctggacacggcgtgcgtcatgatcttcaccgtggagtacctcctgcggctcttcgcggctcccagccgctaccgcttcatccgcagcgtcatgagcatcatcgacgtggtggccatcatgccctactacatcggtctggtcatgaccaacaacgaggacgtgtccggcgccttcgtcacgctccgggtcttccgcgtcttcaggatcttcaagttttcccgccactcccagggcctgcggatcctgggctacacactgaagagctgtgcctccgaactgggctttcttctcttctccctcaccatggccatcatcatctttgccactgtgatgttttatgccgagaagggctcctcggccagcaagttcacaagcatccctgcctcgttttggtacaccattgtcaccatgaccacactggggtacggagacatggtgcctaagacgattgcagggaagatcttcggctccatctgctccttgagtggcgtcctggtcattgccctgccagtccctgtgattgtttccaactttagccggatttaccaccagaatcagagagctgataaacgcagggcacaaaagaaggcccgccttgccaggatccgtgtggccaaaacaggcagttcgaatgcatacctgcacagcaagcgcaacgggctcctcaacgaggcgctggagctgacgggcaccccagaagaggagcacatgggcaagaccacctcactcatcgagagccagcatcatcacctgctgcactgcctggaaaaaaccactaaccacgagtttattgatgagcagatgtttgagcagaactgcatggagagttcaatgcagaactacccatccacaagaagtccctcactgtccagccacccaggcctcactaccacctgctgctcccgtcgtagtaagaagaccacacacctgcccaattctaacctgccagctactcgcctgcgcagcatgcaagagctcagcacgatccacatccagggcagtgagcagccctccctcacaaccagtcgctccagccttaatttgaaagcagacgacggactgagaccaaactgcaaaacatcccagatcaccacagccatcatcagcatccccactcccccagcgctaaccccagagggggaaagtcggccaccccctgccagcccaggccccaacacgaacattccttccatagccagcaatgttgtcaaggtctccgccttgtaaaaccactggacagagggccagagtgggtagtggggaatgaaggggactggcatgttggtgggtggtcactgagaccactccctcccccctttccccactatttctgcctgccccattgtacccctagcactgagacttgtgcctggaaggaaaaagaggtagcaaaggggcacctgaggttcacgctgctagcgtggacatagccctgtgatactgcatctcactggggccagaggaagggaggg

SEQ ID NO: 325 - DNA, 6475 bp, Homo sapiens
gtggtgacgatggtggtggttgtgatgatggtgatgatgatggtgatgatgatggtggtggtggtgatggtggtggtgatggtgatgatggtggtgatggtggtgatgatgatggtgatcatgatgatggtgatggtggttatggtggtgatgatggtgatgatgatggtgatggtggtggtgatggtgatgatgatgatagtgatgatggtggtgatgatgccaatgatgatggcggtggctgtcatgccttgctaacctctgggaaagattgaggacatcggcatgtcggaaaggggcccagctccagttcctcagagtacatgccttgaatacttgggcatggaatctccccaaacttcccttttcccacctgcaaaatggaaataatatctgtatcagctataaaggcttatgcaaatattagtggttttattataattcagaggactaccctggagtttaatcctctgagtaaaaagcaggaagtaaaaactgtagcagtttgtaaacggtctgtgatgttagattgtttccatttaacattttatgtgattggtgtttagacatttctcttcatctgcattggtttttcttagggtagattttcaaacttatgtcttttaaaatacttttaaaaaatacaaaaagtacagaagatgatgtgctaagcctccctcgcctgccctttggtgtggtgtttgcgacggcccagggcccagctcttccaggcttgtctgctgatgcccacagggacccctccctgcagtctttgttccggtttcctcagggcctttgccactagtgggggttcatgctgaagcctctgcctgaggtagtgagttcccctgggccaagtggctagggacagctggacctccctaagagccaccagcggcagcaaacatgccaacatgtctgcaggtcaatgggtgagaagcaagaggagcccaactcgctttcccgttttaggtcattcactagatttcccccggttttgccttttttttttgagacagagtctcgctctgtcgcccaggctggagtgcagtggcatgatctcggctcactgtaacctccgcctcctgggttcaagcaattctcctgcttcagcttcctgagtagctgggattacaggcgcctgccaccatgcccggctaatttttgaatttttagtggagacagggttggtccggctggtctcaaactcctaacctgaggtgattctcccacctcggtctcccaaagtgctgggattacaggcatgagccaccgcgcccggccctttgcatacatcttggtccaaatcagattctgtcttggggagcatcatttcataatcctgctggctttgaacttgtcacagttcagacgtcttccttcttctggctcctcctggtagccccaggtgcctccttcctgacagagcctgctgctcccgtaatacacactcacccctaatgagctacttaaaaataatcaatgatttccagataaaaatcaccattaattttaaatgccctctgtaaaccttgttacaaataattgccagaaacacacaaagtctgaaattaattaaaatcgacagcctcatttgacgggagttgagcttctggcttcttggttatgtgcgtctcttgcttgggcagaagcagtggctgcgagatgtgagcccatgggggagtttgcttaggacccgccgagcacttgggcctgtggaggagtggggaggacacgggcttagagtcctgcagacttggctggctggcctgtgccctcttagggtaatcggatgactttccgagccccaggtttctcatctgtggaagggtttggtagtgccagctccccagggttgcacgtaggtgatggcaagggtgtgcctgccccaagtggatgctcagtcatgatcttgtcgtctttcctcttctctctccctgccccagatcagcctttgcaaagtactcatactgggtcattcactcactcattcactcctgcagtgagatacacagaagctgataggcagcagaggcggcagggacaccgggttcccctcatctgaaaaaaaaacactgaggctgagaatggagaagtgacttagtctgggccagtcctggcagaaccaggagagaacctgtgtgccatgaccccctagcccagcgctgtttccaccgccacatccccgttccctcggggctggtgggtgatggggaaaccgcatttgccaaggcaacgggaggcagccgagggctggggctgggaagtcctgcaaccccctggccctagggtggcacgagcccctttctcagcagtggggtacgtgtgcaggcaccagccagttcttcagctgggttgccatagtaactggatacacttttgttaccttcttttcatggtcaaccttttgtcagtttccattccagaactctgagagtcatcccagcgtgtccttgagcagaacacctgcgtgccgctgtagcttgtcacatttctttgttggtccccgtgtagctgttgttaaggggcacagaaaagccagtgtcccctccctcccctcctttctgagagagcacaggtgaagggcttgtccagccaggaacgaattctcaggtccactcttcactgatgcacaaatgctaggcagtcacttagcatctctgagtcttggtttcctcatctgcagaatcaggaaagtcacatttccctgatcattagcctgttcattgagccagggcttcctgagcacctgctgcctgccaggccttgggtgaggtgctgggttcatgacagcacagggtccccaccttcaagaccatagccagatctgcagacagatcagtaaactccaacttggtgagtgaggcggggagtgcagaggtctgagggggtcacgagaaggagctaccagcccagccaggggctgctggagacagtatccgaggagggtagagatgacacagggaaagtgttgaacagatcatgccgctcagttagggcagtttcttgcctcctcctccctctccctcccagtctctaggtctctcctctcctcccctctgtctccctctttctccaacctgatgggaagctttggacataaaggccgtttcctcatcagacttcttctatgcctttggtcccagagacacggcaacccccacgccctaccctaagtctctgcagacagcagctccggagaagagaacaaagcttgggacttatttatttcccgttttgcagaaatgtttatttgaaagcagcacagcaaggtggaatggtttgatttgattagcaagtctaaatgtattagcagcaagacagaaacgatattacaattagcagtaattagctgtgtgatgactctgggcggcagtgctgggtgacagatgctgcttcctggtcccgggttagacggagagggcatgttacccttgtgaaggggctcggcttcctggggcgggcagaggaccctggccttgttttcaaggctgagtgacagctaattgtcccttggaagagacacaggtgtcagcacccacttgtgttgtgtggaaagtgactttgcggtcttgggggaggcagtggcttgacttgtacggatttggaagcttcgcagctgccctgaatttgcctctgatggcagtggcttccttcgtaccactcatcccttttccaatctttatcacacacagctcctccagacccccttcactgggttttacttatgggctggctctgtccctgagatgtggcctgtgctgcatccctgggcctccaaggtctgcagtgtggacgccctgtgtggtgatgcccggtaaccctgcagggtgctggacatacactcaggagactctgggaaccgtgtgtccacatcgctacatgttacctacttcagcgtgggtgagcagtgactgcaagccagtctgaggtgtagatagagacacctgagaccctgaacctgtcctccaggagtccagatcttccactgggggccagacatgctgacatcctgcagaaagaaaccagtgctccttttggagtggtgaaaatgtcctggaacttggcaggggtggtggttgcacagcttcgcaaatggagtaaatgcagtggcctcgtaggctttgaaatggttacttcttctttccttttttttttttttttttttttttttgagacgaagtcttgctctgttgcccaggctggagtgcagtggcgtgatcttagctcactgtagcctctgtctcccgggttcaagcgattctcctgcctcagcctcccgagtagctgggactacaggcacccgccatgatgcctggctaaattttgaatttttagtagagaccgggtttcaccatgtcggccagactggtcttgaactcctgacctcaaatgatccccctgcctcagcctcccaaagtgctaggattacagaagtgaaatggttacttttatattatgtcaatggttttacctcaatgaacaaaaacaagcaagacaacaagacattttgaaagcccaaacaccataaactgggcacagcttaaagtgtctgagcacacacagccggtaaatggagatagtcatggacaccaagtctccctctgagcagggaaggagctggaggagccaagaggggagaggcacagctgccacggcgctgggcacgtcacaggccagagttggagaaggctggggaggacactgggcagacatgagacaacctttcctttctgccactggctgccctccaggggctgcaggaaggggtcagggtctgccttcctatggctgggagggggctggcagtcctgcagccccgcctgtccttaagactgcctcctgagtgcccttgcacgacctcgggtgcctgtcagagaccacgacagcctctggagtgttggctgctctttccctggtgtcacacgtgaacttggccttggccactgtgttcatcaggccgccaataccaaaggaccagggctgctcagagaggcagcccccagatggcacctcctccctgtaccccactgcccccaagccagcaggaggatcctccacactctagatctctgccaagcactgtgggtgcaggagagaatgaaccagatgtggtctacccttagggggctgcagctggagctgcctgagccacgtggcagcgaggtctaggggtgctggaaagggacaaagctggaagaaatgttttctgagcccaaagtgcagtttcattgcagggggtggttgttactgggggtgaggctgtgaactgggaagatgccctgtcctgcgttttctccccggggccagtgggcctgcctcacctgggatctccagatgcagcagctgcacgcagagtctacacagcagtggccacctggttcccctgtggacacatcctttgttcctcagaatgaaaccatcttgtcaacagccttcgcctatgggagccaggagattggttagctcctacgggagccaggagattgggcaggtgtagtagaagaggaaaaaagggcggtcattctacaattgggaggatgccttacccgaatcagagaaatgctgatgaaaaccacagggaggctgggcgtggtggctcacgcctgtaatcccagcactttgggagaccgaggcgggtggatcgcttgaggtcaggagtttgagaccagcctgaccaacatggagaaaccctgtctctatgaaaatacaaaggttggccaggtgtggtggcgcatgcttatagtcccagctacttaggaggttgaggcgggagaatcgcttgagcccgggaggcggaggtggcagtgggcctagatcgcgccactgcactccagcctgggcatcgcagggagtctccgtctcaagaaacaaacaaaacaaacaaaaacaaaatcacagggagagtcctttttgtttcttccagacgaataccaacactgaaggagaatgatgacggtgttgggggctcctgggtgtgaggagtgctgctgggtgggaagtgggagaatttggaaaacaattcggaaacatctagtaaagatgaggggagatgtacatctcctgcaaaccggagatcccacttgtaggtatttcccatagagaaattattacacacgtgtcctgggaggcctgaaaatcctagcagccaaaatgaaatacaacagaatgtggccaccactgatggataatggataaatatgcacatgtatgcactgtgtctacagcaaggaaaaggaatgagtgaggccacgtgcaacaaccttgactcttgggagcttggagttgaagttttcttcaaaaagttgcagaagaaaacttcatatgatttcatttaattaaagttcaaaacatgcaggccaggtgcagtggctcacacctgtaatcacacactttgggaggccatggtgggaggattacttgaggccaggagttcaagatcagcctgggcaacatggtgaaactccatctctac

SEQ ID NO: 326 - DNA, 6927 bp, Homo sapiens
gatggctgagcgcgcaggagcccgggaggtctgagccgggcgaggctcgctccctgcgcatcgcctcctccgcccgccgcgtggtcgcgggcaggtgggccggggggcgctgggcaggggcggggcagggccagggcaggccggtctgcagccggaggggccggagcggagaagctgcccaccttcccgggctcggagcggccggggctgctcagccggccgggctcgcgatgacctgctgagaagcgtcgtcggaggctgcaggaggcggcctagctgtgggcggtgcagctcgcggcctcctccctcgtcgttcccggccccggccccccacccatccccgtgccccctccctaccgccggccgagatggcggatccagccgaatgcagcatcaaagtgatgtgccggttccggcccctcaacgaagcggagatcctccgcggggacaaattcatccccaaatttaaaggcgatgagaccgtggtgatcgggcaagggaagccatatgtcttcgacagagtgctacctcccaacacgacccaagagcaggtttacaatgcatgtgcgaagcaaattgtcaaagatgtccttgaaggttataacgggacgatttttgcgtatgggcagacttcatcaggaaaaacccacaccatggaggggaagctgcatgacccccagctcatggggatcatcccacgaattgcccatgatatctttgaccatatctactccatggatgagaacctggagtttcacataaaggtttcctattttgagatctacttggacaaaataagggacttacttgatgtatccaagaccaacttggctgttcatgaagataaaaacagagtcccgtatgtaaaggggtgcactgagcggtttgtgtcgagccctgaggaagtcatggatgtaatagatgaaggcaaagcaaaccgacacgtggctgtgacaaacatgaatgaacacagctctagaagtcacagtatcttcctgataaatattaaacaagagaatgtagagactgaaaaaaaactcagtgggaaactttatttggttgatttggctgggagcgaaaaggtcagcaaaactggtgccgagggagctgttcttgacgaagctaaaaatatcaataagtctttgtctgctcttggaaatgtgatctctgctttggcagaagggacaaaaacacatgtgccataccgggacagcaagatgactcggattcttcaggactctttgggtgggaactgcagaaccaccatcgtcatttgctgttctccttctgtcttcaatgaggctgagaccaagtccacactgatgttcggacagagagctaagaccatcaagaatacagtctctgtgaacctagaactgacagcagaagaatggaagaagaaatatgaaaaagagaaagagaaaaacaagactttgaagaatgttatccagcatctggagatggagctaaacaggtggaggaatggagaagctgtgcctgaggatgaacagatcagtgccaaggaccagaagaacctggagccttgtgataacacccccatcatagacaatattgctcctgttgttgctggcatctctacagaggagaaagagaagtacgatgaggagatctccagtctctacagacaactggatgacaaggatgatgaaattaaccagcagagccagctggctgaaaagctgaagcaacagatgttggatcaggatgagcttttagcttccacaagaagagactatgagaagatacaggaggagctgacacgtctccagattgaaaatgaggcagccaaggatgaggtgaaagaagttctccaggccctggaggagctggctgtcaattatgaccagaaatcacaggaagtggaggataagacccgggccaatgagcagctgacagacgagctggcccagaaaacgactacattgacaaccacacagagagagctgagccagctacaagagcttagcaaccaccagaagaaaagggcaactgagatcctgaatttgctgttgaaagatctgggggagataggtggaattattggcaccaatgatgtgaaaactttggcagatgtgaatggagtcattgaggaggagtttaccatggcccgcctgtacatcagcaagatgaagtcagaggtcaagtccctggtgaaccgcagcaaacagctcgagagcgcccagatggactccaacaggaagatgaatgccagcgagcgggagctggcagcctgccagctgctcatctcccagcacgaagccaagatcaagtctctgacagactacatgcagaacatggaacagaagaggaggcagctagaagagtcccaggactcgctcagcgaagagctggcaaagctccgagcccaggaaaaaatgcacgaagtcagcttccaggataaggagaaggaacatctgacgcggttgcaggatgctgaagaaatgaagaaggcgctggagcagcagatggagagccaccgggaagctcaccagaagcagctgtccagactccgagacgaaattgaggagaagcagaaaatcattgatgagattcgggatttgaatcagaaactgcaactggaacaggagaagcttagttctgattataacaagctgaaaatagaggaccaagagagagaaatgaagctggaaaagctcttattgctcaacgataaaagggaacaagccagagaagacctcaaagggctggaggagacagtgtctagagaattgcagacactgcacaaccttcggaaactctttgtccaggatctgaccacccgagttaaaaaaagtgtggagttggacaacgatgatggagggggcagtgctgcccagaagcagaaaatttccttcttggagaataacctggagcagctcaccaaagttcacaagcagctggtccgggacaacgcagacctgcgctgtgaactgcccaagctggagaagcggctgcgtgccacggcggagcgcgtcaaggctctggagagcgcgctgaaggaggccaaggagaacgccatgcgggaccgtaagcgctaccagcaggaggtggatcgtatcaaggaggccgtgcgggccaagaacatggccagaagggcccattcagcccagatcgccaagcccatccgccccggacactacccggcctcatctccaacggccgtccatgccattcgagggggaggaggcagctcttcaaattccactcactaccagaaataaatacaaaatatgactccacgtagcatgtcaaggactacattaatcaccaattcctttatttttccccccctacagtttccattttttttttatacttgcttactccagccatctgcagtacaccagtttcaggtcttttgagctgtgtagagtttctgtgtgtacagatgtgtgctcggacttttctctttttgagaaatctgaaggagatggttgcagaagatccacttactactgagaaccattaccaccgactcggcctccggggtgttgggtggtttctgggtggttcctggagcctcctctgggcagtgcactgtcccatctgtacgccctaatgtgccattccctagaggggaacaaccaagtgccgtggaggcagatgatcatggtctgcctcaactgtctggtttcctgtaaaataaacacattgttttatatttttagggaacaaaaagtgctgctatagggttcaaagttttccttctgaacacttttccgaaacaaattaccccaaagacacattttgaatatcctggtcacatctttggatctgtaaaatataccttttagtatggcacctgttaaaatgcaaagcaaatttctttggggcagaaaaacaatctgacagtagcagtgtagaatttgttcattcaaatacatctgtgtaaatgcaaaaagtcataaaattcacctccgagctgcttgcttttgaacctgcagcaactagtcttagccggcccggtttgaacatcgttctttcagaagtgctgaaaatgctgcaaagttggataagtggaaatgtggctgcccctctcctcactacttcctctctgatcgttctgaagcttgcattgggaatggctgctttctctaaccattttcagcttgagtgggtattgctgaagaaatccaacatcattccagcagttgaaaaaggaagccttcgggagaaagtgcttgtcaaaattttgttctttgtgcttgtgtatgagtaagttgccatgaataagttattattttaacccataattggcgactgtttatatgaattctttctttggcaccaaataggtttcatcttcttaggcacaattagaaaaaatccacatagatggatattttacatttagttattgctttatccaaatacatgaatctaaagctgaatcaacccttacttccagttgtgcttattaagaagatcaatttccaagtagtaaagttttcagggaaactgactgtgctgctatttgttttgacaaatttgggggtaagtcaatgacaaccaaaccaatctcggtggaaactcctatcctatcatgttgtgtgcccaagatgagtgagctggcactgtgccctgaagctttcaccactgtaatgaaatatatgccaggggagactttgggcttttctcatgactgtgtgggtcgaaggtagctcaagtgtgtgtgtgtgtgtgtgtgtgtgtgtgtgtgtgtgtgtgtatgtgtgtaaagtgctaagaactgtgcattgacatccaaacatttcttgtacaaaatttccctagcaaagcaaacctgctttgacttaatttatttgttaaatgttgcactttgtttatgtatgttttgtttttggtggggaataaggagagagaggacgacaaattctattgaagtatttattttgtgaagatggcaattttgcatttgtttaaatttttttcattctttaattttgttatcagtgccagcccaatatacctgctctaccattatttgcggtctgataaaagggtccttgtggggcaggttttgcaaagcttatcaggtaataacatatgccacataaccttgttgatatgtttgcttctgatttgggaagctaaacattggtgtttgagaggattgccaattattaattgtcattaccactactctccattactttttgtttggaaattgaacaaaggtcagtaatggtttttggctcttgttaatatccatcataaaatagattgttttagattctttccagggtgatttttccctgggtaccccgtttctacttctaaagaattgcttggcactttcatgtttcaaagggaaacattcgcttgtagttccattttacttgatctctacaagggactgacaacatttgctttatttttattcacagagaaagttggctttgatgtctcttaaagataattctgctagttgctgatcagccagtcagttcacctagcttcaatctttataggacttctaatctaattttcctatagtgtgactaaaagggaggcaaattattggaacggattattcaaatggatccttaaatattgctatgtataataagccagttattatatcaggaccatgttctctgtaggccactttctaaaaaagccacatatgtgcaattttcaggtttttagactattgctccctgtactttaaatgtaaaaaccacacttctgaacaactaagctcatgaatatgattttggttatatgcagcttttgactagcatgtattgtgtctttttctcctctatgaataattttatatttcatgctacttcttgaaagtttactctttgatgctctaagagaacagccagatggtttatatgaataatctttatctgcaggatggtggattggtaaattaggagaatgttgtttgagatatcaagatttatgtctgggaactaaaatatataatgccaaatgtgtttttgtcaattactagagaattctgtgcaaacatatcatctcttcaaatgctgcacactttgcttttgttaaacagcaggtagtagacagaacaataacagtttcgcgttaagacttttaaaggaaatagaatcgtgattaagaaatcagaatttatagatatattgggataaatgaagaaataaaaatgtttgtctagaatgtagcatctagtgactttttaaagccctaacgtttacataaagaagctctagttcttatagaaataacaaagcaaataaaagttcttaacaatcccctctttcgaagtgcatttttttaaagcagggcaggagacatttggactctagctatatgacatactgggaaaggcagagggtggagggaagatttcacttcattgtctagcccagaatcttgagcaagctaaagaaaccatcataatctaaaattgcttcatttaacactaacaatttagactttttaaaccaagcattgaataatggctggataactgccgaagtaagcgccgctccatgaagtctgcttacttatttaaaaattgtgtatcagttttaaatactgttcattgtgtgcagatataaggggaatagggcattctgtagaattatacatgtctagtttgtaaagtgtgtcctgtgtactgcagatgtgtgttctctgggctttatgtatctgtacagtagctttcacattaaaaaaattgtggacaaacttgtccggggggtttgaggggagaatggtggtttatatcaataacgatgctgtactatagtccatgtaacaaaagatctggaagtcaccctcctctggcccacggaaaattttggtaatcttctaggttctaaaatgaagatgtatgggtactctggcagactgcatgttgtataatttgaaaaatactaaaagtggaaaataaaattgaattaaactttg

SEQ ID NO: 327 - DNA, 2495 bp, Homo sapiens
cggaggctgagcaccgagagccgccaaggaagagaaactaaccacagccaagttaccccgccggctttccttcgctgcgctaaggaatgaaacccttccagctcgatctgctcttcgtctgcttcttcctcttcagtcaagagctgggcctccagaagagaggatgctgtctggtgctgggctacatggccaaggacaagtttcggagaatgaatgaaggccaagtctattccttcagccagcagccccaggaccaggtggtggtgtcgggacagccagtgacgctactttgcgccatccccgaatacgatggcttcgttctgtggatcaaggacggcttggctctgggtgtgggcagggacctctcaagttacccacagtacctggtggtagggaaccacctgtcaggggagcaccacctgaagatcctgagggcagagctgcaagacgatgcggtgtacgagtgccaggccatccaggccgccatccgctcccgccccgcacgcctcacagtcctggtgccgcctgatgaccccgtcatcctggggggccctgtgatcagcctgcgtgcgggggaccctctcaacctcacctgccacgcagacaatgccaagcctgcagcctccatcatctggttgcgaaagggagaggtcatcaatggggccacctactccaagaccctgcttcgggacggcaagcgggagagcatcgtcagcaccctcttcatctcccctggtgacgtggagaatggccagagcatcgtgtgtcgtgccaccaacaaagccatccccggaggaaaggagacgtcggtcaccattgacatccagcaccctccactggtcaacctctcggtggagccacagccagtgctggaggacaacgtcgtcactttccactgctctgcaaaggccaacccagctgtcacccagtacaggtgggccaagcggggccagatcatcaaggaggcatctggagaggtgtacaggaccacagtggactacacgtacttctcagagcccgtctcctgtgaggtgaccaacgccctgggcagcaccaacctcagccgcacggttgacgtctactttgggccccggatgaccacagaaccccaatccttgctcgtggatctgggctctgatgccatcttcagctgcgcctggaccggcaacccatccctgaccatcgtctggatgaagcggggctccggagtggtcctgagcaatgagaagaccctgaccctcaaatccgtgcgccaggaggacgcgggcaagtacgtgtgccgggctgtggtgccccgtgtgggagccggggagagagaggtgaccctgaccgtcaatggaccccccatcatctccagcacccagacccagcacgccctccacggcgagaagggccagatcaagtgcttcatccggagcacgccgccgccggaccgcatcgcctggtcctggaaggagaacgttctggagtcgggcacatcggggcgctatacggtggagaccatcagcaccgaggagggcgtcatctccaccctgaccatcagcaacatcgtgcgggccgacttccagaccatctacaactgcacggcctggaacagcttcggctccgacactgagatcatccggctcaaggagcaaggttcggaaatgaagtcgggagccgggctggaagcagagtctgtgccgatggccgtcatcattggggtggccgtaggagctggtgtggccttcctcgtccttatggcaaccatcgtggcgttctgctgtgcccgttcccagagaaatctcaaaggtgttgtgtcagccaaaaatgatatccgagtggaaattgtccacaaggaaccagcctctggtcgggagggtgaggagcactccaccatcaagcagctgatgatggaccggggtgaattccagcaagactcagtcctgaaacagctggaggtcctcaaagaagaggagaaagagtttcagaacctgaaggaccccaccaatggctactacagcgtcaacaccttcaaagagcaccactcaaccccgaccatctccctctccagctgccagcccgacctgcgtcctgcgggcaagcagcgtgtgcccacaggcatgtccttcaccaacatctacagcaccctgagcggccagggccgcctctacgactacgggcagcggtttgtgctgggcatgggcagctcgtccatcgagctttgtgagcgggagttccagagaggctccctcagcgacagcagctccttcctggacacgcagtgtgacagcagcgtcagcagcagcggcaagcaggatggctatgtgcagttcgacaaggccagcaaggcttctgcttcctcctcccaccactcccagtcctcgtcccagaactctgaccccagtcgacccctgcagcggcggatgcagactcacgtctaaggatcacacaccgcgggtggggacgggccagggaagaggtcagggcacgttctggttgtccagggacgaggg

SEQ ID NO: 328 - DNA, 1735 bp, Homo sapiens
agactgccgcagcgactcatcctatcgataaggttcagttagccaaggtggaggatgggaaaagaatggaactgtcccagctactcaatgagatcagggcaaactatgaaaagatcctcaccagaaatcagatagagacggtgctctcaacaaggatccagctagaagaagacataagcaaaaaaatggacaaagatgaagaggctttgaaggcagctcaagcagaactcaaggaggcccgacgccagtggcaccacctgcaagtggaaattgaatctctccatgctgtggaaaggggccttgaaaactccctacatgccagcgagcagcattaccagatgcagctgcaagacctagagactgtgattgaaggactagaaaaagagctacaggaagtaaggcgcggcatcgaaaagcagcttcaagagcacgagatgcttctcaacacgaagatgaggctggaacaagaaatagcaacttatcgccacctcctagaaaaagaagaaatcagatattatggttgtatccaaggtgggaaaaaagacaaaaagcctaccacaagtagagttggttttgttttaccatcagccattataaatgaaatatcttttactacaaaagtcccacaaaagtatgagaatgaaaatgtagaaacagtaaccaaacaggcaatcttaaatgggagtatcgttaaggagagcactgaagctcatggcactattcagacagagaaagtggatgaagttattaaagaatgggaaggttctttctttaaagataaccctcgattgaggaaaaagtctgtttctcttcgatttgatcttcatttagcagccactgatgaagggtgtttagagactaagcaggataatctaccagatatagaagtcaggcttatcatgagaagatcatgcagtattccctctatcaaacctccatcaacagctaattaatccaaagatagtatttgacttgattggaaaatgttaggatggaccaaggtgggccataccaactccctctgtcccaaaatgtaagttattacgtatgtatggaaaatgttatgatcaatatgtggttctcttcagaagaaaaaaacaataaaggacatttctctgaatctaattatggagatagacatatatatatatatatgaatgagagggagtagcttaaaaataaaatcacaaatccagtacagtctctttctttatattctcccaatagtcttctttttcccttgaaacttcatcagagactgtaagcattaacctggtttagtaaagtctttgtaatttttttcaatggctgaatacgctaaggaaaaaagaattgtttgaataggattgtgttaagagtcacactgagttattcaccattattccatgactggttaaacctacaatgtttgttctatttttcaaaaagagcaattataaacaagtttttaaagggggactcactattcacctaatgaggattcttctttttgagataaatcatttgtatactgagaaaaatgagttattttccatgagaaattctgagcaaactatagaacacaccccagggctaatttgagataagtacaattaagttaatctacatatatctaaaaggttttttttgtaataagtatctgatttccggaagatttactttactcaaggaactttaaaggttgtatcccccaccaaaaaaagaaaaaaaatcagaaggccaactgcgcaaacaa

SEQ ID NO: 329 - DNA, 4895 bp, Homo sapiens
gcaagatggaggccgcgcagaggccgccgcctgggccgaggcagccgctgctgggagcgccgagccgcggcgcctaggccgtgccagtcccggatccgctgcctccggccgtgcccagcagctcccagacgcccccagctctgccccaggccccgccctcgcgggttccttgactcagggccgcttctcgcgtgcgtccccagctcccgcccggcagcccggcgctccgtcccgggccggcggcccccgccagccgccgccgccgccggccccgcctccgggcaccatgctgccctcgcaggaggcctccaagctctaccacgagcactacatgcggaactcgcgggccatcggcgtgctgtgggccatcttcaccatctgcttcgccatcatcaacgtggtggtcttcatccagccctactgggtgggcgacagcgtgagcacccccaagcctggctacttcggcctcttccactactgcgtgggcagcgggctggcgggccgcgagctcacctgccggggctccttcaccgacttcagcaccatcccgtccagcgccttcaaggcggccgccttcttcgtgctgctctccatggtgctgatcctcggctgcatcacctgcttttcgcttttcttcttctgcaacacggctacggtctacaagatctgcgcctggatgcagctcttggcagctctgtgcctcgtcctgggctgcatgatctttcctgatggctgggatgccgagaccatccgggacatgtgtggggccaagacggggaagtactccctgggggactgttcagtgcgctgggcatacatcctggccatcatcggcatcctcaacgccctcatcctctccttcctcgccttcgtgctgggcaaccggcaaacagacctgctgcaggaggagctcaagccggagaacaaagattttgtgggctctacagtaagctccgtgttgcggcccgggggtgatgtctctggatggggagtccttccctgccccgtggctcactcacagggaccctgaaaggccaggatcacagcccagtaattggcctgacctcagcttgtcctgccttctgccctctcgtcactccattcaagctctgagggaagaccctgatctcagacttacttctcaccgactaccctgcaagctccaggctttgaggagaggaaagcctggatgtggcctgggggagaggagaggccctccaaaccttgggagggtctaattcttgctcctccctcaatttgacctaagggagcctgcatctgcgtaggcccttgggcttctcctctcctctctagactggcctggaggtccctgcagatccccagggagagcggagctgtagttccagctccccaggccccctcagtctggagggctgccgcctggctgtatccgcacctcttctggtccctgcctcttcaagaaatttattctagatactgctccagggtgggctggactctttcctactttttttttttttcttttttggctgatgttggttccaccacatctgccacaaagctccaggtgccaccagtctcccctgggacctcctctgctccattccggcctgctcccagctcaccctgagggagagctgcaccgagggatgcacagggccctgctgtcagctgcagaccggggccctgatcagcccagagtcagaaaagactttcaggctctggaggtagcgggagggggtacgtggcctcggcagttggagcttagaagctgctcagcccgggctggcctggcctcctcttcctctctgctggaacatctcactgatgactgagcccttgaccttggcctcttttgcccaggcctcctctctgctgggatgtctcaccaatgactggacccttgaccctggcctgttttgtacagcacagacttcttggccctgttgtcagggttgggggtgtggaggggaccccagaggtggggagttgggggatgcattaccccttctgccccttttcatgccctccataccccaggcgtctaccaagggcagagactgtcttgtctctttgatacttttctgcataacttgaacttgcaggtcatctctgaacagggtacccctgtcccccttcctaagccttgttaccctgtcccagcctcttcctcctcctggcccacctctcgccttgcgatatgcccagggtctgcacctatgggcagtgcttggagccgaggcatgagtgtatgtgtatgtgggtgaaatgtgtgtgcgtgtgtgtgcgcgtgtgagcgtgtgtgtgtgtgtgtgtgttgggggacaggtgagaagtttctcccccctccacccactgtgggggcgtctcccttccccttggcagggagcaggtgagggagactcctggtattttttgaacacccgtcattcccctgtgggtctggcggcagagccatctctcccggggagcctccctgccctggggcctggacagctccctcagcactagttgctggtgcagaccggcttcgtccagcgccccctcctggcggcctggacctgcagggaaggggcggtgccctgcaggatgccaggggaagccgcctcgggcctcggcggaggggagagggtcgcttgagcgccatgtgtttgccaaccttgtgttcatttccacaggacttggacctgagagttagggtttccaagaaagaccctagaagtcccctgcctgtctccccactctggaccctagccggaatcagatgttgggacctagtgggttcctgccacctggaacttaccaagtcccgacttcactcctccacttactcctcccgggcaaagcctccccgcagtgctctggtcccagcgctgggctccccttccccgccggcgccttcccggacagtccagtcggcctggggtaggggcgctgcgggacagagggtccgagttaaatgcgggaggatgcgggagccccgtgggagggagttggggtaggagggagttcctcaaagatgcaaaccaagcccagcgttggagggggagagcagagttaggagagagtgaggggaggggcgcagcaagcgactgggaatgggagaagacactggggtgaggagaagaggggtgcagagacagggagatgagagatgattggagaaggagcgagggggacgcacaggcacagagaaacagcgcgaggaggagagatcgagagagacggggcagaggtggagagagatgagagaccagctgagaggctgcccgagagcttggggtgggggaggggaaatggatgaaaaggcggaaaaaggactcgggagcggggaagaggtaaatggagatgtgggttgggggcaagaatgggatgcagaggaaggagaggaggatgaaggagccaggatgcggggcagtggggagggggttgctatctgggcactgggtgaggggagagcttgttcccccaaggacgcctgccaccaggtgtccttgccacaccttgttccccaaggacacccaccaaacctgtgccctggtgcgggggatagaactgacctttcagaggctggaggcccggggcacaggcagccaaggccgcatccttttgggaagaactggagtgaaggaagccacttcagaggacgtagtgggtccagctgacttaggagtgggtcagcgccgggtggagaggagggaggctagttccctggtggggtagcctggcaacattcccattccaccgcacctggccagctgccatcttggcagagccagggggagatgcaccagggagtttggagtcaggaaggcagagttgtgtgggctgaagtctgcgggaaccccagggtgacacaggcaaggggtagaagtcagagtggggaccaaaccatagactggggccctgggttctgcagaggtgtggatggggcaggtggcaggtgctccagtgggggccccaggtgaggccctgatggccctcctggggcaataaagacatcatgggaagggggctttgtggtttgcctctgctctcgtcgggcgatctggctttagccttcaggaggaggtaagcagaggagatcagtgcctgtttctgaccccaggagggccttgttgggctccaacctagagccttccggcttcaggtcccaagagaagtccccccctaactgtgacccccctaactgtgatcaggggtctgccattgcccgcttttctctgcctgatctggggactcaggagaggccacggcagccacagcctaggggtggttcagtccctggcccacagtctggtcagttgagtccttctgggaaccggggctatgaaaactttcgtctttggggaccggtacccatgaaggaaaactttcctgagggggtgaggaccaaagaatcaagatccttttcaggcctgatagccaagatgatgagaacttttagataaggctgtggggagagtccctggccttttgagcatcctgcttgggcacacggggaataacctttctccagcttccagtgtgaactgagaaagagaaagggaaaccctgtctttggagaagctgggatgttcccagcaccagaaacttctgcaggcccctgcctggcccacggctaacctttgggtgggactggagtttcctgaacagggaacaagggagccttccgcagagctctgatgggcaggcctccgagggcctgtgctgtgtgctgttaggatagcttggtgttgtctataccccattagtaagttttgtctgagtgtgtcctcgctgttcattgtctaatttggtaacatttattttggtcctgaccccttctgctgctgctgggtttaagcttcagtgcaggtggaatgacattcaaataaagaaacactttctatcacccaaaaaaaaaaaaaaaa

SEQ ID NO: 330 - DNA, 576 bp, Homo sapiens
atggaaatgagggtccccgctcagctcctggggctcctgctgctctggctccgaggtgccagatgtgacatccaggtgacccagtctccatcttccctgtctgcgtctgtaggagacagagtcaccatcacctgccgggcaagtcagggcattagcaatgggttatcctggtatcagcagaaaccagggcaagcccctacgctcctgatctatgctgcatccagtttgcagtcgggggtcccatctcggttcagtggcagtggatctgggacagatttcactctcaccatcagcagcctgcagcctgaagatgttgcaacttattactgtctacaggattatactaccccattcacagtgttacaagccataacaaaaaccccccagagaagcagatgtgtgagtctgcactgtcctagctactcctcctggtgcctccatctgctgagaacatttcccaaattgcatccacactttgaagtttctgtagaaagtgacatgaagcctcctctataccttaactatctttccttcacggcatccccagcggcacagacagggcaaaccctctcctga

SEQ ID NO: 331 - DNA, 3744 bp, Homo sapiens
tttcagccaaccagactggagcagctgcgagtgctacatcttggctgtctgaagcgattggctcctctctggggagtggagggtgttcagttattaatgaccgctgagcaggcagcaccatgtcagtgtgacaactgatcgggtgaacgatgcaccactaaccaccatggaaacaaggaaaaataaagccagctcacaggatctctcttcactggattgagagcctcagcctgccgactgagaaaaagagttccaggaaaaagaaggaatcccggctgcagcctcctgccttcctttatattttaaaatagagagataagattgcgtgcatgtgtgcatatctatagtatatattttgtacactttgttacacagacacacaaatgcacctatttataccgggcaagaacacaaccatgtgattatctcaaccaaggaactgaggaatccagcacgcaaggacatcggaggtgggctagcactgaaactgcttttcaaggaggtgaagcattccacagataatcagctactctattcagggaaggagtgtaaacatcaccactttttgcatgtttgcataaaaaaggcccactgaatcagttaaagacgaggaagaggaggagaaagagaaagaagaggaagatgttgggcaacatttatttaacatgctccacagcccggaccctggcatcatgctgctattcctgcaaatactgaagaagcatgggatttaaatattttacttctaaataaatgaattactcaatctcctatgaccatctatacatactccaccttcaaaaagtacatcaatattatatcattaaggaaatagtaaccttctcttctccaatatgcatgacatttttggacaatgcaattgtggcactggcacttatttcagtgaagaaaaactttgtggttctatggcattcatcatttgacaaatgcaagcatcttccttatcaatcagctcctattgaacttactagcactgactgtggaatccttaagggcccattacatttctgaagaagaaagctaagatgaaggacatgccactccgaattcatgtgctacttggcctagctatcactacactagtacaagctgtagataaaaaagtggattgtccacggttatgtacgtgtgaaatcaggccttggtttacacccagatccatttatatggaagcatctacagtggattgtaatgatttaggtcttttaactttcccagccagattgccagctaacacacagattcttctcctacagactaacaatattgcaaaaattgaatactccacagactttccagtaaaccttactggcctggatttatctcaaaacaatttatcttcagtcaccaatattaatgtaaaaaagatgcctcagctcctttctgtgtacctagaggaaaacaaacttactgaactgcctgaaaaatgtctgtccgaactgagcaacttacaagaactctatattaatcacaacttgctttctacaatttcacctggagcctttattggcctacataatcttcttcgacttcatctcaattcaaatagattgcagatgatcaacagtaagtggtttgatgctcttccaaatctagagattctgatgattggggaaaatccaattatcagaatcaaagacatgaactttaagcctcttatcaatcttcgcagcctggttatagctggtataaacctcacagaaataccagataacgccttggttggactggaaaacttagaaagcatctctttttacgataacaggcttattaaagtaccccatgttgctcttcaaaaagttgtaaatctcaaatttttggatctaaataaaaatcctattaatagaatacgaaggggtgattttagcaatatgctacacttaaaagagttggggataaataatatgcctgagctgatttccatcgatagtcttgctgtggataacctgccagatttaagaaaaatagaagctactaacaaccctagattgtcttacattcaccccaatgcatttttcagactccccaagctggaatcactcatgctgaacagcaatgctctcagtgccctgtaccatggtaccattgagtctctgccaaacctcaaggaaatcagcatacacagtaaccccatcaggtgtgactgtgtcatccgttggatgaacatgaacaaaaccaacattcgattcatggagccagattcactgttttgcgtggacccacctgaattccaaggtcagaatgttcggcaagtgcatttcagggacatgatggaaatttgtctccctcttatagctcctgagagctttccttctaatctaaatgtagaagctgggagctatgtttcctttcactgtagagctactgcagaaccacagcctgaaatctactggataacaccttctggtcaaaaactcttgcctaataccctgacagacaagttctatgtccattctgagggaacactagatataaatggcgtaactcccaaagaagggggtttatatacttgtatagcaactaacctagttggcgctgacttgaagtctgttatgatcaaagtggatggatcttttccacaagataacaatggctctttgaatattaaaataagagatattcaggccaattcagttttggtgtcctggaaagcaagttctaaaattctcaaatctagtgttaaatggacagcctttgtcaagactgaaaattctcatgctgcgcaaagtgctcgaataccatctgatgtcaaggtatataatcttactcatctgaatccatcaactgagtataaaatttgtattgatattcccaccatctatcagaaaaacagaaaaaaatgtgtaaatgtcaccaccaaaggtttgcaccctgatcaaaaagagtatgaaaagaataataccacaacacttatggcctgtcttggaggccttctggggattattggtgtgatatgtcttatcagctgcctctctccagaaatgaactgtgatggtggacacagctatgtgaggaattacttacagaaaccaacctttgcattaggtgagctttatcctcctctgataaatctctgggaagcaggaaaagaaaaaagtacatcactgaaagtaaaagcaactgttataggtttaccaacaaatatgtcctaaaaaccaccaaggaaacctactccaaaaatgaacaaaaaaaaaaaaagcgaaagactgcagttgtgctaaaaacaaaacaaaacaaacaaacaaacaaaaaagtaaaaaaagattactttcgagagagaagtttaagcttcaccaatgctgctcctgaccaatggaaatatgtacaacttcagcattttaagtaactggcttcaaggggtactgtggcaaccaaataaaataactccattttctaaaactttcatgtaacttttatgtctggactacagttcaagtggacaaaaacatttctgtattttttttaagtaaataagagtagttgaactgagcaatacctcctcctgtgttgtattacacatattagccacgagtttttgcagtgaccagataaacttgaattgacacgtggtgtaataaaatggacaaattctgtagagtagacacagtgagtatgtggacctcttttataaggaaaaatacattttggattaaaatcaattgcttctgtcttgttttgtttctaaataaagaataatttctgggaaaaaaaaaaaaaaaaaaa

SEQ ID NO: 332 - DNA, 6880 bp, Homo sapiens
agccttgagtgtcattcaagggacagcacaacctcatccaagctctcctacctctgcccagccgtccctctcatcctccccattcctcgtccacactccatccaaagaagagggaaagcaccgaatagaggggggcgaaggcaaagtctgctgttcttccccctgggcccccttgctcctccatcctcattctctcaccaccagcccccctaaccccaaggagcccaggaactgaggcgactcgccccactgccatgtccaaaagcttgaaaaagaaaagccactggactagcaaagtccatgagagtgtcattggcaggaacccggagggccagctgggctttgaactgaaggggggcgccgagaatggacagttcccctacctgggggaggtgaagcccggcaaggtggcctatgagagcggcagcaaattggtgtcggaggagctgctgctggaggtgaacgagacccccgtggcggggctcaccatcagggacgtgctggccgtgatcaaacactgcaaggaccccctccggctcaagtgtgtcaagcaaggaggaattgttgataaagaccttcgtcactacctcaacttacgatttcaaaagggttctgtggaccatgagcttcagcaaatcattcgtgacaacctctacctccgcacggtgccatgcaccacaaggccacataaggagggtgaggtccctggagtggattatattttcatcactgttgaagattttatggaattggagaaaagtggtgctctcctagaaagtgggacttatgaagacaattactacggtaccccaaagccgccagcagaaccagcaccattattgttaaatgtaacagaccagatacttccaggagccactccaagtgctgaaggaaaacggaagaggaataaatcagtgagcaacatggagaaagccagtatagagcctcctgaggaggaagaggaagagaggcctgtggtcaatggaaatggagtagtagtaacaccagaatccagtgaacatgaagacaaaagtgcaggtgcctcaggggagatgccctcccagccttatcctgcaccagtgtacagtcagcctgaggagctgaaggagcagatggatgacacaaagccaactaaacctgaagacaatgaggaaccagacccattgcctgataactgggaaatggcctatacagagaagggcgaagtctacttcattgaccataacacaaagacaacatcatggctggatccacgacttgcgaaaaaggctaaacctccagaagagtgcaaagaaaatgagcttccatatggctgggaaaaaatcgatgatcccatttatggcacttattatgttgaccacataaatagaagaacacagtttgaaaatcctgtcctggaagcaaaaaggaagctacagcaacataacatgccccacacagaacttggaacaaagcccctgcaggccccaggtttccgagaaaaaccactcttcacccgggatgcatcccagttgaagggaacattcctcagcaccaccctaaaaaagagcaacatgggctttggatttaccatcattggtggagacgagcctgatgagtttctgcaggtgaaaagtgtgattccggatgggcctgcagcacaggatggaaaaatggaaacaggtgatgtcattgtctatattaatgaagtttgtgtccttggacacactcatgcagatgttgtcaaacttttccagtctgttcctattggtcagagtgtcaacctggtgttgtgtcgtggctaccctttgccctttgatcctgaagaccctgctaacagcatggtgccaccccttgcaataatggagaggccacctccagtgatggtcaatggaagacacaactatgaaacatatttggagtacatttctcggacctcacagtcagttccagatataacagatcggccgcctcattctctgcactccatgccaactgatggtcagctagacggcacgtatccaccgcccgtccatgatgacaatgtgtctatggcttcatctggggccacccaagctgaacttatgaccttaaccattgtgaaaggtgcccagggcttcggcttcactattgccgacagtcctacaggacagcgggtgaaacaaatacttgacattcagggatgccctggcctgtgtgaaggcgacctcattgttgagatcaaccagcagaatgtacagaacctgagccatacagaagtagtggatatacttaaggactgtcccattggaagtgaaacttctttgattatccatcgaggaggtttcttttctccatggaaaactccaaagcctataatggaccgatgggagaatcaaggcagtcctcaaacgagtttatctgctccggccataccgcagaacctgcccttcccacctgcccttcacaggagctcctttcctgactcaacagaggcctttgacccacggaagcctgatccatatgagctctacgagaaatctagggccatttatgaaagtaggcaacaagtgccacccaggaccagttttcgaatggattcctctggtccagattataaggaattggatgttcatcttcggaggatggagtctggatttggcttcagaatcctcgggggagatgagcctggacagcctattttgattggagctgtcattgccatgggctcagccgacagagatggccgccttcacccaggagatgagcttgtgtatgttgatgggattccagtagccggcaaaacccaccgctatgtcatcgacctcatgcaccacgcagcccgcaatgggcaggtcaacctcactgtgagaagaaaggtgctatgtggaggggagccctgcccagagaacgggagaagtccaggctctgtatccacccaccacagctctccacgcagtgactacgcaacctacaccaacagcaaccacgctgcccccagtagcaatgcctctccccctgaaggcttcgcctcccacagcctgcagaccagtgatgtggtcattcaccgcaaagagaatgagggcttcggctttgtcatcatcagctccctgaacaggcctgagtctggatccactataactgtgccccataaaatcggacgcatcattgatgggagtcctgcagatcgctgtgcaaaactaaaagtgggagaccggatcctagcagtgaatggccagtctatcatcaacatgcctcacgctgacatcgtgaagctcatcaaggatgcaggtcttagtgtcacccttcgcatcattcctcaggaggagctcaacagccccacctcggcacccagctcagagaagcagagtcccatggcgcagcagagtcccctggcacagcagagtcccctggcccagccaagcccagccacccccaacagccccatcgcccagccagcaccacctcaaccacttcagctgcaaggacacgaaaatagttacaggtcggaagtgaaagcaaggcaagatgtgaaaccagacatccgacagcctccattcacagactacaggcagcccccgctggattacaggcaacccccaggaggggactaccagcagcccccacccttggactacaggcagcctcccctactggactacaggcagcactcccccgacaccaggcagtaccctctgtcggactacagacaaccccaggattttgattatttcactgtggacatggagaaaggagccaaaggatttggattcagcattcgtggaggaagggaatacaaaatggatttgtatgtgttgagactggcagaagatggaccagcaataaggaatgggaggatgagggtaggagatcaaatcattgaaatcaatggggaaagcacaagggacatgacacatgccagagcaatagaactcatcaaatctggaggaagacgagtgaggctgctgctcaagagaggcacgggacaggtcccagaatatgacgaacccgccccctggagttctcccgctgccgccgccccaggtctgccggaagtaggcgtctccctggacgacggcctcgctccattctctccatcacatccagccccaccctccgacccttcccaccagataagcccaggcccaacttgggatatcaaacgggaacacgacgttaggaaaccaaaggagctttcagcctgcggccagaagaagcagcgcctcggggagcagagggagcgctcggcgagtccgcagagggccgcgcggccgaggctcgaggaggcgcccggcggccaggggcggcccgaggccggcaggcccgcctcggaggccagggcgcccgggctcgcggcggcagacgcggcggacgcggcgcgggcgggcgggaaggaggcgccccgtgcggcggcgggctccgagctctgccggcgcgaaggcccgggggctgcgccggcgtttgccggcccgggcggcggcggcagcggcgcgctggaggccgagggcagggcgggtgcgcgcgcgggtccccggccgggcccgcgacccccggggggcgccccggcgcgcaaggccgccgtcgcgccggggccctggaaggtgccgggttctgacaagctgcccagcgtcctcaaacccggcgcctcggccgccagcagatgagccgcgcggccacggccaacccgcccgccccggcgcaggcagttcttcttaggttccgtctcacggcgttttaatttattttcactgtcacacgcatagatccacgaggcaccaaggcctgggagcatcgacgtgaagtcccacgtgtccggtgtgcttgggcggcatcgcatcaacgcgcagacctaaactgatcctaaagcccccggttcccttgtgggggctttggcagctatggaagaaccaaaataacgtgaagaacatcacagagagacagtgcagtgtagctttagtttaagaaaaaaaaatattcctccccactgcatgaaggacttggatgtcatccaaactttatatcaagaaacaggacaaagttaagagcaatcacaaactggaatatcgccttaaaaatcaaactgcacggagcaagctgaaactgagacaagattatatcttttaattgatctaaagcgttgtaaataaattgttctcgacatatctagacaggggttaaagggtttctttgacacattcggaaccgttcacccatgacatgtttccatggctcacccttggcatccatcctcggtgttagcagcagcgttccctgcctcctgcaggatgacttagaaatctagtgagtttcttggtgtgatgccatttttattgccctttctgtgatcaaatcatatttctgtacattttcagtggtagaaaaaaaaggttttaaaaattgtatcctagggaacagtttgccataagtcagaattttgcagtttagctcatagatcttaattggtttttctctaaaatatgaattttataattgaaggaccacaatttgtttaatcaagataggcaacgctgcagttcctttatgaagaggcttttctgtcgtcccaggctagcagagatggatagcttctttgtcagcaatgtgatttcacttattttattgtcttattttaaaccctgtctccatgacttcatttgcactttgacagagcagaggcagagtatttgtcttatatttctcagattataatattaaaaaattacaatcaatttattttcattaaagaacgtgagtctttttagcattcctttctgcttatccttctttccttaccctttgtccttttgtttccattagttttctttcgtcttgtattccttgccactttattttgttagcaacttctagatgtttatcttcatggatctatgattgacctcctagtaaaattctaagtcttgcctttcttccctgctgttttagcatttctttgtaaaatgttagcttcaattaattagccattggtacttactgtagctacacatattaaaaggcaaagtgtttctgaaggcaatttctttttaatatgcccgaatgaatgaggcttcatcctttccatattcttactctttacaggagttcaaatgcaaataagctccacctccctgcacttgtagtctaaaaagtaaaaggggcgatcaggtccatctcaaaggtcacacgtaatagcctccctgggctgatcattccctctccttgtaattgcagtatcctgagtagcagtttaattttcatcaaacatcggagtagtttagttgtttgacaggaggagaataaggctgaaagcctcaagtgaaggatcttgcagcttgtaaaagcaatttccaaaaatgaaacccattcatcgtaaacaaaagcacaaacacttgtagcagtttataatgcttttggtttaatctcaattagtctttctcccctggactagaaatccagtatagtttgccattaatttattgaatctggttttggacaatgcttctgtagtgtagctgcacgtcctggtactgtatcctctgactttattttccatgtattacaaaaggaaaaaaaaattgagattacactggcataaactctagtttgcacagttcacagctactacttgtgcagtaattgctttatgcggctgtaatccataacctgtgaagacagcacatcatctaaatcccattccaaataatatttgtgtagtgttagctgtgaatttaccctgtacagctgtatctctataaatataattccatgtattaatagtcacagaaagactgtaagtgagcaactatttttatgaaacgtaccactatggataaattaacttttacagaaatcttgtttactgtatgatattctaaaacactgtcaaataaaatatatatccaaaaatcttttctttttccaacta

SEQ ID NO: 333 - DNA, 4035 bp, Homo sapiens
gtgtagcgccagcgcgctgtgacgtaatgtgaggggtctcccggcagggctgagctggaccaatgaggaaaggcaaggggccgatttgcctgttctcacgccccaccctcagacctagccggagcaaagtttcacttatagaagggagaggagcgaacatggcagcgcgttggcggttttggtgtgtctctgtgaccatggtggtggcgctgctcatcgtttgcgacgttccctcagcctctgcccaaagaaagaaggagatggtgttatctgaaaaggttagtcagctgatggaatggactaacaaaagacctgtaataagaatgaatggagacaagttccgtcgccttgtgaaagccccaccgagaaattactccgttatcgtcatgttcactgctctccaactgcatagacagtgtgtcgtttgcaagcaagctgatgaagaattccagatcctggcaaactcctggcgatactccagtgcattcaccaacaggatattttttgccatggtggattttgatgaaggctctgatgtatttcagatgctaaacatgaattcagctccaactttcatcaactttcctgcaaaagggaaacccaaacggggtgatacatatgagttacaggtgcggggtttttcagctgagcagattgcccggtggatcgccgacagaactgatgtcaatattagagtgattagacccccaaattatgctggtccccttatgttgggattgcttttggctgttattggtggacttgtgtatcttcgaagaagtaatatggaatttctctttaataaaactggatgggcttttgcagctttgtgttttgtgcttgctatgacatctggtcaaatgtggaaccatataagaggaccaccatatgcccataagaatccccacacgggacatgtgaattatatccatggaagcagtcaagcccagtttgtagctgaaacacacattgttcttctgtttaatggtggagttaccttaggaatggtgcttttatgtgaagctgctacctctgacatggatattggaaagcgaaagataatgtgtgtggctggtattggacttgttgtattattcttcagttggatgctctctatttttagatctaaatatcatggctacccatacagctttctgatgagttaaaaaggtcccagagatatatagacactggagtactggaaattgaaaaacgaaaatcgtgtgtgtttgaaaagaagaatgcaacttgtatattttgtattacctctttttttcaagtgatttaaatagttaatcatttaaccaaagaagatgtgtagtgccttaacaagcaatcctctgtcaaaatctgaggtatttgaaaataattatcctcttaaccttctcttcccagtgaactttatggaacatttaatttagtacaattaagtatattataaaaattgtaaaactactactttgttttagttagaacaaagctcaaaactactttagttaacttggtcatctgattttatattgccttatccaaagatggggaaagtaagtcctgaccaggtgttcccacatatgcctgttacagataactacattaggaattcattcttagcttcttcatctttgtgtggatgtgtatactttacgcatctttccttttgagtagagaaattatgtgtgtcatgtggtcttctgaaaatggaacaccattcttcagagcacacgtctagccctcagcaagacagttgtttctcctcctccttgcatatttcctactgaaatacagtgctgtctatgattgtttttgttttgttgtttttttgagacggtctcgctgtgtcacacaggctggagtgcagtggcgtgagctcggctgactgcaaactctgcctcccaggtttaagcgattctcctgtcacagcttcccaagtagctgggatttacaggtgtgcaccgccatgccaggctaatttttgtgtttttagtagagacagggtttcgccaagttgtccaggctggtcttgaactcctgggctcaagtgatccgcccgcctcagtctcccaaagtgcgaggatgacatgtgtgagctaccacaccagcaatgtctatgcttctcgatagctgtgaacatgaaaagacatctattgggagtccgaggcaggtggattgcttgaggccaggagttagagaccagcctggccaacaaggcaaaaccccgtctctactaaaaatatgaaaattagctgggcttggtggctcatgcctataatcctagctacttgggaggctgaggcacgagacttgcttaatacctgggaggcggagattgcagtgagccgagatcacgctactgcgctccagcctgagtgatagagtgagactctgtctcaaaaaaaagtatctctaaatacaggattataatttctgcttgagtatggtgttaactaccttgtatttagaaagatttcagattcattccatctccttagttttcttttaaggtgacccatctgtgataaaaatatagcttagtgctaaaatcagtgtaacttatacatggcctaaaatgtttctacaaattagagtttgtcacttattccatttgtacctaagagaaaaataggctcagttagaaaaggactccctggccaggcgcagtgacttacgcctgtaatctcagcactttgggaggccaaggcaggcagatcacgaggtcaggagttcgagaccatcctggccaacatggtgaaaccccgtctctactaaaaatataaaaattagctgggtgtggtggcaggagcctgtaatcccagctacacaggaggctgaggcacgagaatcacttgaactcaggagatggaggtttcagtgagccaagatcacaccactgcactccagcctggcaacagagcgagactccatctcaaaaaaaaaaaaaaaagtaagaaagaaaaggactcccttagaatgggaaagaaaaatcataaaatattgagctgatgcctgtatatagaaattaagcgtttctcgaaagctgttctatgttttgctgttattttagtctttattctcttcctttaggtggagaaacaaagtaccaatttgaagggattttttttattttgtcttttggtttctgtcagtagaaataaccatatgtgctaaccaaatttctgtgaagaatgttttcatggttatcattatatctaactataacctcccccatagttatgaagagtaacctgaaatgccactattgtggaaataggataattgtaattgtgaaaaaataattttaaggaaatcttacaagtattacattaaaaagatactatgactgccacctgccatttaccttctaataaccctgccatgtggtttgcagaaagagatggatatagtagcctcagaagaaatattttatgtgggttttttgtttttcgttactagatttcatggatgaggggatatggttgaccttttactttttaatggagcagccagtttttgttaattactcacttgtaaattgtgagattctgaattccttacctgctattcttgtacttgtctcaggccaaatctatgctgtggttcttatgagacttgtatgaagatgccctgatttgtacagattgaccacgggaatactactgccatgtaatctgtatagttccagataatttgtcatgaacattgacagaatgacaattttttgtatttgctttttctccctttaagagcacattcttctgtaaggagaaaggcagcattctggctaaaatgtgtagaaggtaatttactacacttataaaatagtgtgacttttgtgaaaattttgaattagctttcatatgaagtgccttaagtagactcttcatttacttttctggtaatggtttaaatatcatttgttatgcatttttaagatacagttcagaatgacacattgtagtggcaaagataaccaaatgtctggctgtttgctttttgaccatatcaataaacttttacaatctaaaaaaaaaaaaaaaa

SEQ ID NO: 334 - DNA, 2637 bp, Homo sapiens
atggatctggataaaccatctgtttggggctcattaaaacagcggaccaggccattgttgatcaacttaagcaagaagaaggtgaaaaagaacccaagtaagcccccagatctacgggcaaggcatcacttggaccgccgtctcagcctctctgtgcctgatctcctggaggctgaggccttggccccagagggccggccttactccgggccacagtcttcctacacctcggtgcccagcagtctgtccactgcagggatctttcccaagagcagcagtagctccttgaaacagtctgaagaagaattggattggagccaggaagaagccagtcacctccatgtggtggaaacagactcagaggaggcctatgcctctcctgctgagcggagacgggtgtccagcaacggcatctttgatcttcagaaaacttcccttggaggggatgcaccagaagagccagagaagctatgtggaagcagtgacctgaatgcttctatgacatctcaacattttgaagaacaatctgtaccgggggaagccagtgatggcttgagtaacctccccagcccttttgcgtacctcctcaccatacacctgaaggaaggccggaacctggttgtccgagatcgctgtggcacaagtgatccttatgtgaaatttaagctgaatgggaagacgctgtacaaaagtaaagtcatatataagaacttgaacccagtatgggatgagatagttgtattgccaatccaaagccttgatcaaaagctacgtgtgaaggtatatgatcgagatttaaccacatctgatttcatgggttctgcatttgtcattctcagtgatcttgagcttaacagaacaactgaacatattttaaaactggaagatccaaacagtttagaagatgacatgggagtgatcgtcttaaatttgaacctagtggtaaaacagggtgatttcaagagacaccgttggtcaaatcggaagcgattaagtgccagcaagtcctctttgatacgcaacctacggctctctgagtccttgaaaaagaaccaactctggaacgggattataagtataactttgttggaagggaagaatgtctcaggaggaagcatgacagagatgtttgtccagttaaaactgggagatcagaggtataaaagtaagacactgtgtaagagtgcaaatccgcagtggcaggaacattttgactttcactacttctctgacaggatgggcattttggacattgaagtgtggggaaaggacaacaaaaagcatgaggaacgtctgggcacatgtaaagtggatatctcggcactccctctgaagcaagccaactgcctggagctgccactggacagctgtctgggggctctccttatgttggtcacacttacaccctgtgcgggggtctccgtctctgatctgtgtgtctgccccttagcagacctcagcgaaagaaagcagattacccagcgatattgcttacagaaccccctgaaagatgtgaaagacgtcggcattctacaagtgaaggttttaaaggcagcagatctcttagcggcagatttctcagggaagagtgacccattttgcttgttggagttaggcaatgaccgacttcagacgcataccgtctacaaaaacctcaaccctgaatggaacaaagtttttacatttcccattaaagatatccatgatgttttggaagtgacagtgtttgatgaagatggagataaacccccagattttcttggaaaagttgccattcccttgctgtccattagagatggacaaccgaattgttatgtactaaagaataaagatttagaacaagcttttaaaggagttatttacttagagatggaccttatatataatccggtgaaagcaagtattaggacttttactccccgggaaaagcgctttgttgaagacagccgcaagctgtccaaaaagatcttatcaagagatgtggaccgtgtgaaaagaatcactatggcaatatggaatacaatgcagttccttaaaagctgcttccagtgggaatccacattaagaagtacaatagcattcgcggtatttttgatcactgtctggaattttgaactatatatgatccccttggcattgttgctgatctttgtctacaatttcatcagacctgtgaaaggcaaggtcagcagcatccaggacagccaggagagcacagacatagatgacgaggaggatgaagatgacaaggaatctgagaaaaaggggttgattgaaagaatctatatggtacaggatattgtttcaactgttcaaaacgtcttggaggaaatagcttcttttggagaaaggattaagaacacatttaactggacggtccccttcctttcatctctggcctgtttgattctggcagcagccaccatcattttgtatttcattccactgcggtacatcattttaatctggggcataaataaatttactaagaagcttcgaaatccctattccatcgacaataatgagctactagacttcctctctagggtaccgtctgatgttcaaaaggtgcagtatgcagaattgaaactctgcagcagccacagccccctgcggaagaagcgcagcgctctctag

SEQ ID NO: 335 - DNA, 5375 bp, Homo sapiens
gagtgcggggctcctgcgctccgctcgccgccgccgccggggaaggacagacggacggcgcttcctccttcggcgagcggttcccgggcacctcggcttggcccgggcgcgagtggagcgcgcctggctggccgccggcctcctgaaggtcccgttgcgtaccccctgggctggatatgttcatgttcacgtgaagatggatttactgtacggtctcgtgtggctgctgacagtcctcctggaggggatctctggccaaggagtgtacgctcctcccacggttcgtattgtgcactcaggcttggcctgtaacattgaagaggagcgctactccgaaagggtctacactatccgggaaggagaaacccttgagttgacttgtctagtcacaggacatccacgtccacagatcaggtggaccaaaacagcaggaagtgcctctgacagattccaagactcaagtgtcttcaatgagactttgaggattacaaatattcagcgacaccaaggaggccggtattactgtaaagcagagaatggcttggggtctccagcgataaagtcaatcagagtggatgtatactatttggatgatccagtagtaactgttcatcaaagtataggtgaagctaaagaacaattttactatgagagaacagtgttcctccggtgtgttgccaattccaatcctcctgttcggtatagctggagacgtggccaggaggtcttgctgcaaggatctgataaaggagttgagatttatgaaccattctttacccagggtgaaacaaagatcttaaaactaaagaatcttcgacctcaggactatgctaattatagctgcattgcttcagtgaggaatgtatgtaatattcctgataagatggtgtcgtttagactgtccaataaaacagcatcaccgtcaattaaactcttggtggatgatcctatagttgtaaatcctggagaggccataacattagtatgtgttacaacaggaggagagcctgcaccttctctcacctgggtcaggtcctttgggactctgcctgaaaagactgttttgaatggaggaactttgaccatacctgccatcacctcagatgatgctggtacttacagctgcattgccaataataatgtgggaaaccctgcaaaaaagtccaccaacatcattgtgagagcattaaaaaaaggacgattttggatcacaccagatccttatcacaaagatgacaacatccagattggccgtgaggtgaaaatatcttgccaagtagaagctgttccttctgaggagctaacatttagttggtttaaaaatggtcgtccattaagaagttctgagcggatggtcattacacagactgatcctgatgtctctccgggaacaacaaacttggacatcattgatttaaaattcacggattttgggacgtacacatgtgtagcatctctgaagggaggaggaatatctgatatcagtatcgatgttaatatatccagcagcacagttccacccaatctgactgttccacaggaaaaatcaccattggtcaccagagaaggagacacaatagaactgcaatgtcaagtaactggcaaacctaaaccaatcatcctttggtctagagcggataaagaagttgcaatgcctgatggatcaatgcaaatggagagttatgatggaacactgaggattgtgaatgtatctagggaaatgtcaggaatgtacagatgtcagaccagccaatacaatggatttaacgtgaaaccaagggaagccttggtgcagctcatcgttcagtatccccctgcagtggaaccagcattcttggaaatccggcaaggacaggatcgaagtgtcactatgagttgcagagtactgagagcctatccaatacgggtgctgacctatgagtggcgcttgggcaataaattattacggacgggtcaatttgactctcaggaatacacagagtacgctgtgaagagtctttccaatgaaaactatggggtttataactgtagcatcataaatgaagctggagctgggagatgcagctttcttgttacaggaaaggcctatgctccagaattctattatgatacctacaatccagtatggcagaacagacaccgtgtttattcttacagtctacagtggacacagatgaatcctgatgcagtggatcggattgttgcataccggttgggcatcaggcaggctggacagcagcgctggtgggagcaggagattaaaataaatgggaatattcaaaagggagaattaattacatataacttgacagagctaattaaaccagaagcttatgaagtccgactgactcctctcaccaaatttggtgaaggagattcaacaattcgtgtgatcaaatatagtgctcctgtaaatcctcatttgagagaatttcattgtggatttgaagatggtaatatttgtttgttcactcaagatgatacagataattttgactggacaaagcaaagtacagcaacaagaaatacaaaatatactcctaatacaggacctaatgctgaccgtagtggctccaaagaaggtttttatatgtacattgagacatcacgacccagattggaaggcgaaaaggctcgacttctcagccctgttttcagcatagctcccaaaaacccttatggacccacaaacactgcatattgtttcagcttcttttatcacatgtatggacaacatataggtgtcttaaatgtttatctacgtttgaaagggcaaacaacaatagagaatccactgtggtcttcaagtgggaataaaggacaaagatggaatgaggctcatgttaatatatacccaattacttcatttcagctcatttttgaaggtatccgaggtcctggaatagaaggtgacattgctattgatgatgtatcaattgcagaaggagaatgtgcaaaacaagacctagcaactaagaattccgttgatggtgctgttgggattttggttcatatatggctttttcccattatcgtcctcatctctatcttaagtcctcgaaggtgaccttatcctggcagaggctataaaagattcaccaggcactggcatgaagaaagagtctttgtaaatggacattgaacaaacaaactaccaaagattcctccactgactactgactcaaaaataaaataataaaaacaaatttttttaagcactggggataaaaagacatcatggaagtataacttattccagactaaacataaaagataatcttgacctgagtagagaagagaccttcaggtgcttttgtggctaaaaagattacagcgtcatctggttgaactctggaaaaaaaaaaaaaaatgaaaaaaagaaaaaaaaaagagctatagaaatccttgtcaaagcacaaagtcatggctggttttgtttcaaatgaatagtttgcttgttaccatggaaacctaatggcctgccaacaaaaacctcactgtaaacagggtacgtgaagagctggcatttattttccttacgagaaggttttcgtagagaattaaataaatgtaggcccttttacctttggctgttacccttccttgaaaataacccgaactcagaattatttaaagcattcatgtttctccccaccttatccccatcccacctttattattattatttttctcccatggctaagctagataactgtatgctgtctctttttgcatgcactactatccaggatggtaaacctgggcttacatgttacacaggcttatcggagtttgcttgcggccacttgaacacccaaactacgtcatctgttccaatgaagaaaccaaaccaccatcttttataaattgccatggaaaccaagtgccttcaatgaaacaagcctgaataattttcaactcagaagcttgcactgctaagagtggtttgtgtaaaactattttataaacaaactacagagcctaaatgtgcaaattacaggcaagacaacaaagccgcttctgaagaagaaaggaccgaagctgctgcgtaagcccatgcagacaagatatttgttgtttaacctcctagacagccatggcctttcggcttattgtccattagaaaatcacttccattgagaccagacatggagcaacactttttttcttccaggttattaaatgggtcaaccagagcaaaaggttattaagaatacttagtgcagaaggtggtaaaacacaaaagtgatttttttactctaacctccatttgaaatgaaattggccctagctttagagggaacaagaaaatgtttgggattgcagtgcatactaactctacagtggaactgggcctgaaaaatctggctttattctaaactctgagggtaatatgcctctgccctttagtcagactctgtgcaaattgtgaaatattattttattattttaccaagattataaaaacacttttacaaaaaaacaaaaacctgtaaaaataattttgagctacctgacgacaaatcatatctttaaccagccagttttccaatgcattgtaaatttcacttaaacctgttggttatgaaaatttgaagatcattttccttaaattatctcagcttttaacttcatttaaaaagacttttgtctaagaagaatattattattatatgttctttcaacaccccaggattaaaaaaactgattatgcaagcaattggaatataagtattaaattatagcatttgcaaatattaatataaaagcacaacaaaatgtagtggaaaatgacaaagcttgttttttaaaacaattctgtagaaatgtttgtgcaaattcagtaattcaacttaaaatataattttacagctatgttcaataaagcctctttccaggtaaggtatgacaagcagtatgtgtgtttgttgagcaatgttcacttatcactaaaatgaaattagttatacaatttattggttaccatgggataaatcttcagtgctccacataccttaatgtctgcagaaagaaattttaataggaactccctgatgcactcccctatattgtaatacatgcagaaagcagttaaacctttgaaggtaaaatatgaaacatatatgaacctggaatttaatgtctattttcagtcagttcaaaaggggaccagtttgaatatttaggtagtgatggaattgatctgaaccaagtcctttaaattaaacataataaacaaatgagtttcataacttatttgaatgaattagacatcttaaaattttttcagagtttcacagtaacccatatactttatcagaccaaagagattcaagtacacaatatctggggcatttcttttacgttttacaaaa

SEQ ID NO: 336 - DNA, 2100 bp, Homo sapiens
tctgcctgctgtcgggggcgggctggccaggccgaggccggagcaggcaggcatcccccggagttgtctcttttcatgccagcgtcaacaggaggctgtctggacacactgattactcactcaccagcctccctcttttgtccaccagcccagcctgactcctggagattgtgaatagctccatccagcctgagaaacaagccgggtggctgagccaggctgtgcacggagtgcctgacgggcccaacagacccatgctgcatccagagacctcccctggccgggggcatctcctggctgtgctcctggccctccttggcaccgcctgggcagaggtgtggccaccccagctgcaggagcaggctccgatggccggagccctgaacaggaaggagagtttcttgctcctctccctgcacaaccgcctgcgcagctgggtccagccccctgcggctgacatgcggaggctggactggagtgacagcctggcccaactggctcaagccagggcagccctctgtggaatcccaaccccgagcctggcgtccggcctgtggcgcaccctgcaagtgggctggaacatgcagctgctgcccgcgggcttggcgtcctttgttgaagtggtcagcctatggtttgcagaggggcagcggtacagccacgcggcaggagagtgtgctcgcaacgccacctgcacccactacacgcagctcgtgtgggccacctcaagccagctgggctgtgggcggcacctgtgctctgcaggccaggcagcgatagaagcctttgtctgtgcctactcccccagaggcaactgggaggtcaacgggaagacaatcgtcccctataagaagggtgcctggtgttcgctctgcacagccagtgtctcaggctgcttcaaagcctgggaccatgcaggggggctctgtgaggtccccaggaatccttgtcgcatgagctgccagaaccatggacgtctcaacatcagcacctgccactgccactgtccccctggctacacgggcagatactgccaagtgaggtgcagcctgcagtgtgtgcacggccggttccgggaggaggagtgctcgtgcgtctgtgacatcggctacgggggagcccagtgtgccaccaaggtgcattttcccttccacacctgtgacctgaggatcgacggagactgcttcatggtgtcttcagaggcagacacctattacagagccaggatgaaatgtcagaggaaaggcggggtgctggcccagatcaagagccagaaagtgcaggacatcctcgccttctatctgggccgcctggagaccaccaacgaggtgattgacagtgacttcgagaccaggaacttctggatcgggctcacctacaagaccgccaaggactccttccgctgggccacaggggagcaccaggccttcaccagttttgcctttgggcagcctgacaaccacgggtttggcaactgcgtggagctgcaggcttcagctgccttcaactggaacaaccagcgctgcaaaacccgaaaccgttacatctgccagtttgcccaggagcacatctcccggtggggcccagggtcctgaggcctgaccacatggctccctcgcctgccctgggagcaccggctctgcttacctgtccgcccacctgtctggaacaagggccaggttaagaccacatgcctcatgtccaaagaggtctcagaccttgcacaatgccagaagttgggcagagagaggcagggaggccagtgagggccagggagtgagtgttagaagaagctggggcccttcgcctgcttttgattgggaagatgggcttcaattagatggcaaaggagaggacaccgccagtggtccaaaaaggctgctctcttccacctggcccagaccctgtggggcagcggagcttccctgtggcatgaaccccacagggtattaaattatgaatcagctgaaaaaaaaaaaaaaaaaaaaaaaaaaaaaaaaaaaaaaaaaaaaaaaaaaaaaaaaaaaaaaaaaaaaaaaaaaaaaaaaaaaaaaaaaaaaaaaaaaaaaaaaaaaaaaaaaaaaaaaaaaaaaaaaaaaa

SEQ ID NO: 337 - DNA, 3721 bp, Homo sapiens
aaaagggccggcgccctggtgctgccgcagtgcctcccgccccgtcccggcctcgcgcacctgctcaggccatgatgagcttcggcggcgcggacgcgctgctgggcgccccgttcgcgccgctgcatggcggcggcagcctccactacgcgctagcccgaaagggtggcgcaggcgggacgcgctccgccgctggctcctccagcggcttccactcgtggacacggacgtccgtgagctccgtgtccgcctcgcccagccgcttccgtggcgcaggcgccgcctcaagcaccgactcgctggacacgctgagcaacgggccggagggctgcatggtggcggtggccacctcacgcagtgagaaggagcagctgcaggcgctgaacgaccgcttcgccgggtacatcgacaaggtgcggcagctggaggcgcacaaccgcagcctggagggcgaggctgcggcgctgcggcagcagcaggcgggccgctccgctatgggcgagctgtacgagcgcgaggtccgcgagatgcgcggcgcggtgctgcgcctgggcgcggcgcgcggtcagctacgcctggagcaggagcacctgctcgaggacatcgcgcacgtgcgccagcgcctagacgacgaggcccggcagcgagaggaggccgaggcggcggcccgcgcgctggcgcgcttcgcgcaggaggccgaggcggcgcgcgtggacctgcagaagaaggcgcaggcgctgcaggaggagtgcggctacctgcggcgccaccaccaggaagaggtgggcgagctgctcggccagatccagggctccggcgccgcgcaggcgcagatgcaggccgagacgcgcgacgccctgaagtgcgacgtgacgtcggcgctgcgcgagattcgcgcgcagcttgaaggccacgcggtgcagagcacgctgcagtccgaggagtggttccgagtgaggctggaccgactgtcggaggcagccaaggtgaacacagacgctatgcgctcagcgcaggaggagataactgagtaccggcgtcagctgcaggccaggaccacagagctggaggcactgaaaagcaccaaggactcactggagaggcagcgctctgagctggaggaccgtcatcaggccgacattgcctcctaccaggaagccattcagcagctggacgctgagctgaggaacaccaagtgggagatggccgcccagctgcgagaataccaggacctgctcaatgtcaagatggctctggatatagagatagccgcttacagaaaactcctggaaggtgaagagtgtcggattggctttggcccaattcctttctcgcttccagaaggactccccaaaattccctctgtgtccactcacataaaggtgaaaagcgaagagaagatcaaagtggtggagaagtctgagaaagaaactgtgattgtggaggaacagacagaggagacccaagtgactgaagaagtgactgaagaagaggagaaagaggccaaagaggaggagggcaaggaggaagaagggggtgaagaagaggaggcagaagggggagaagaagaaacaaagtctcccccagcagaagaggctgcatccccagagaaggaagccaagtcaccagtaaaggaagaggcaaagtcaccggctgaggccaagtccccagagaaggaggaagcaaaatccccagccgaagtcaagtcccctgagaaggccaagtctccagcaaaggaagaggcaaagtcaccgcctgaggccaagtccccagagaaggaggaagcaaaatctccagctgaggtcaagtcccccgagaaggccaagtccccagcaaaggaagaggcaaagtcaccggctgaggccaagtctccagagaaggccaagtccccagtgaaggaagaagcaaagtcaccggctgaggccaagtccccagtgaaggaagaagcaaaatctccagctgaggtcaagtccccggaaaaggccaagtctccaacgaaggaggaagcaaagtcccctgagaaggccaagtccccagagaaggaagaggccaagtcccctgagaaggccaagtccccagtgaaggcagaagcaaagtcccctgagaaggccaagtccccagtgaaggcagaagcaaagtcccctgagaaggccaagtccccagtgaaggaagaagcaaagtcccctgagaaggccaagtccccagtgaaggaagaagcaaagtcccctgagaaggccaagtccccagtgaaggaagaagcaaagacccccgagaaggccaagtccccagtgaaggaagaagctaagtccccagagaaggccaagtccccagagaaggccaagactcttgatgtgaagtctccagaagccaagactccagcgaaggaggaagcaaggtcccctgcagacaaattccctgaaaaggccaaaagccctgtcaaggaggaggtcaagtccccagagaaggcgaaatctcccctgaaggaggatgccaaggcccctgagaaggagatcccaaaaaaggaagaggtgaagtccccagtgaaggaggaggagaagccccaggaggtgaaagtcaaagagcccccaaagaaggcagaggaagagaaagcccctgccacaccaaaaacagaggagaagaaggacagcaagaaagaggaggcacccaagaaggaggctccaaagcccaaggtggaggagaagaaggaacctgctgtcgaaaagcccaaagaatccaaagttgaagccaagaaggaagaggctgaagataagaaaaaagtccccaccccagagaaggaggctcctgccaaggtggaggtgaaggaagacgctaaacccaaagaaaagacagaggtagccaagaaggaaccagatgatgccaaggccaaggaacccagcaaaccagcagagaagaaggaggcagcaccggagaaaaaagacaccaaggaggagaaggccaagaagcctgaggagaaacccaagacagaggccaaagccaaggaagatgacaagaccctctcaaaagagcctagcaagcctaaggcagaaaaggctgaaaaatcctccagcacagaccaaaaagacagcaagcctccagagaaggccacagaagacaaggccgccaaggggaagtaaggcagggagaaaggaacatccggaacagccaaagaaactcagaagagtcccggagctcaaggatcagagtaacacaattttcactttttctgtctttatgtaagaagaaactgcttagatgacggggcctccttcttcaaacaggaatttctgttagcaatatgttagcaagagagggcactcccaggcccctgcccccaggccctccccaggcgatggacaattatgatagcttatgtagctgaatgtgatacatgccgaatgccacacgtaaacacttgactataaaaactgcccccctcctttccaaataagtgcatttattgcctctatgtgcaactgacagatgaccgcaataatgaatgagcagttagaaatacattatgcttgagatgtcttaacctattcccaaatgccttctgttttccaaaggagtggtcaagcccttgcccagagctctctattctggaagagcggtccaggtggggccggggactggccactgaattatgccagggcgcactttccactggagttcactttcaattgcttctgtgcaataaaaccaagtgcttataaaatgaaaa

SEQ ID NO: 338 - DNA, 4464 bp, Homo sapiens
ttcgtcccgggcggtgcgttccactgctctggggccggcgccgcgcccagtcccgcttcgggccgcaagccccaccgctcccctccccgggcaggggcgccgcgcagcccgctcccgccgccacctcctcccctgccgccctcctagccggcaggaattgcgcgaccacagcgccgctcgcgtcgcccgcatcagctcagcccgctgccgctcggccctcggcaccgctccgggtccggccgccgcgcggccagggctccccctgcccagcgctcccaggccccgccacgcgtcgccgcgcccagctccagtctcccctccccggggtctcgccagccccttcctgcagccgccgcctccgaaggagcgggtccgccgcgggtaaccatgcctagcaaaaccaagtacaaccttgtggacgatgggcacgacctgcggatccccttgcacaacgaggacgccttccagcacggcatctgctttgaggccaagtacgtaggaagcctggacgtgccaaggcccaacagcagggtggagatcgtggctgccatgcgccggatacggtatgagtttaaagccaagaacatcaagaagaagaaagtgagcattatggtttcagtggatggagtgaaagtgattctgaagaagaagaaaaagcttcttttattgcagaaaaaggaatggacgtgggatgagagcaagatgctggtgatgcaggaccccatctacaggatcttctatgtctctcatgattcccaagacttgaagatcttcagctatatcgctcgagatggtgccagcaatatcttcaggtgtaacgtctttaaatccaagaagaagagccaagctatgagaatcgttcggacggtggggcaggcctttgaggtctgccacaagctgagcctgcagcacacgcagcagaatgcagatggccaggaagatggagagagcgagaggaacagcaacagctcaggagacccaggccgccagctcactggagccgagagggcctccacggccactgcagaggagactgacatcgatgcggtggaggtcccacttccagggaatgatgtcctggaattcagccgaggtgtgactgatctagatgctgtagggaaggaaggaggctctcacacaggctccaaggtttcgcacccccaggagcccatgctgacagcctcacccaggatgctgctcccttcttcttcctcgaagcctccaggcctgggcacagagacaccgctgtccactcaccaccagatgcagctcctccagcagctcctccagcagcagcagcagcagacacaagtggctgtggcccaggtacacttgctgaaggaccagttggctgctgaggctgcggcgcggctggaggcccaggctcgcgtgcatcagcttttgctgcagaacaaggacatgctccagcacatctccctgctggtcaagcaggtgcaagagctggaactgaagctgtcaggacagaacgccatgggctcccaggacagcttgctggagatcaccttccgctccggagccctgcccgtgctctgtgaccccacgacccctaagccagaggacctgcattcgccgccgctgggcgcgggcttggctgactttgcccaccctgcgggcagccccttaggtaggcgcgactgcttggtgaagctggagtgctttcgctttcttccgcccgaggacaccccgcccccagcgcagggcgaggcgctcctgggcggtctggagctcatcaagttccgagagtcaggcatcgcctcggagtacgagtccaacacggacgagagcgaggagcgcgactcgtggtcccaggaggagctgccgcgcctgctgaatgtcctgcagaggcaggaactgggcgacggcctggatgatgagatcgccgtgtaggtgccgagggcgaggagatggaggcggcggcgtggctggaggggccgtgtctggctgctgcccgggtaggggatgcccagtgaatgtgcactgccgaggagaatgccagccagggcccgggagagtgtgaggtttcaggaaagtattgagattctgctttggagggtaaagtggggaagaaatcggattcccagaggtgaatcagctcctctcctacttgtgactagagggtggtggaggtaaggccttccagagcccatggcttcaggagagggtctctctccaggactgccaggctgctggaggacctgcccctacctgctgcatcgtcaggctcccacgctttgtccgtgatgcccccctaccccctcactctccccgtctccatggtcccgaccaggaagggaagccatcggtaccttctcaggtactttgtttctggatatcacgatgctgcgagttgcctaaccctccccctacctttatgagaggaattccttctccaggcccttgctgagattgtagagattgagtgctctggaccgcaaaagccaggctagtccttgtagggtgagcatggaattggaatgtgtcacagtggataagcttttagaggaactgaatccaaacattttctccagccggacattgaatgttgctacaaagggagccttgaagctttaacatggttcaggcccttggtgtgagagcccagggggaggacagcttgtctgctgctccaaatcacttagatctgattcctgttttgaaagtcctgccctgccttcctcctgcctgtagcccagcccatctaaatggaagctgggaattgcccctcacctcccctgtgtcctgtccagctgaagcttttgcagcactttacctctctgaaagccccagaggaccagagcccccagccttacctctcaacctgtcccctccactgggcagtggtggtcagtttttactgcaaaaaaaaaaaaagaaaaaagagaaagaaaaaaaagaatgaatgcaagctgatagctgagactgtgagactgtttttgtccactcttctgaatcactgccacttgggtcagggaccacagccattgccacccttggcccatctctctgcgtgcgtgccttgagcacacatataaaaagtgccatgtgcaattgtcttatcttttatgatctaggctttgcctagggatcactactccttaacgggctggctggggcaatgaggaaaagctcctttgctcctgtaaggccataagtggctgttaacagattttcaaatgcctgaagagattgctgagacctgctagagtcatatgttcggggaattaagtctttatcctagacaacaaggtacagatgcaaactgcagtgttattggagggtcaatcggcaaggatatgattatcccaaaatggagttcatcgaccctagctttcctttagattatatataaataaaagtgcagtcctcttctaatggccacagttggttttcttgtagcccagaaagtccaaattaaaggaaataaattcagttttatgttagccttccttggtgcatcagggtgtcagtggaaataggatcaggtggtgtgtgtgtgtgtgttttgtgtgtgtgtgtacacatgtgtttatatatacatgtgtgagggaaagtgtgtacatatatgtaggattgtaaccagacggaaaagaacgaggatctccagggtgtttgaatcagcaacagatttgtgttttctaacatgcatttagttggagaggcatggttctgtttgttttgttttgatctaatttgccattggaaataggtacagttacacagagaaggaagaaccaggaaagtgagatccatgaaactaaatgagcagctgtcagaatccagtgtggctgagcctacctagcttatgaaatctaacccagggttccctgagtccaagaccacttagattattaagattttgaacgtccagaggagtgaaaagtctgttttctgacgtaagccggagctgaggataaagccagaggccagtggattaggtgtatggaatgtggatggagagggcttgtgtgggatgtggccagggagtgggtgaggaaggccgcttctaaatggcctgtaaaaacttgagattggatagacgaaaggaaatggagaaattaaagaattggagaaactagttatctgtgttgctgactttgggacccatccaagactcctgcccttggggtgttccatggtggtttcttcctgcctgggcgccaccctttccccagttcaggccctccctggaggactagtttgtgtattggtatcctccccagtggacccaaaccagcgcatacttggtgtgtggagatgggagacaaaggacagatctaggagccttgaaggatcaccagccaccgaccctccatcagggccaactgggcaggaaagggaacattgcagacctgatttcccgacgatgtcaccctgtcctccctccttgcttcttgctctgctaactcaactctgccttcctctttttcattcttctactctgcc

SEQ ID NO: 339 - DNA, 9368 bp, Homo sapiens
ctctctctctctctctctctctctctttctttctttccgatggggaagagagggtggtgacaagttagaagcgcttgcggaaggtccccgcccccaggatcaggctccccctgcaaggggacgatgcaaaggtaaaagcacctcgctccgcagcatccagacctggaggggctgcgaccacgggccgagcccacccattccccagccaaaggacgggcccgccgctctccatggtactgcggagagctcagctccgcccttctctttcagaaggacagcacccggcgtcacgtaacccagccttctcaggctccaccaccgccttttccttcccagctctttccctctcctccccctcctcctccttctcctcctcctcctcctcctgctcccctccgttgcctgttctcccctcccgcactcctggagatagacgctcaagcctgacgcctctgaaaaggcagcagcagtcgccttatccatagacctcaggaaattcgctttgaccgatgcatgcttcaggctctggctcgagctgaggggaataaccgggcagatgtctgagtccttaaaaaagacaagataaaaccaaaatgcatcaccaacacacaaccaattgatgtgctggcatcttagcttggccctgcagaggcagagagaaaagaagaggagctgttgcgatttccacatctaacagcttctggctatttcgcaactgctgggtttgagtcctactgttgccgtggctgaaaagagaagtaaaatccaacttgtgagaccacgcacaaggaattaggctttggctgcagcggtgctgaagcccatgctatgacagaagaagcaggcctttgaagctatcctcgggttaagaaatggtgccctaaagaggcaagcatccctttctccgttctgctgtaagacaccacatctgaaggagacagacttgaggcattcacaagcatccaaggatactggctcactgctggcttcctgtactttcttgagaaaagtgttttctttttactgactctcactgcttccttttggcctggtaccactggtggaacctggcagataatgggatttgaggagttaagtatctgttgacactgcagatactcttaaattagttaatcagactcaaatgggtcagtgctttcccttgatcttttgttgaagccttttccagaacgttgtctccaaagtgcatcctccctttggtctggaagttctgtggctaccctgtaccactggggtcaacgttttccagttggaagaggactacagggagagagggcggggttattggaagaagaagaagaaaaaaagaactagataaaggagggcacatccctctcactcccgcctttccccttacctttctgtctctcgggacccttatttcttcgtcacggtgtccaggaccattttgaccctgtcggccccggcacccccccgccgcaccccagccccgagcatggggacggcgctgctccagcgcgggggctgttttcttctgtgcctctcgctgctgctcctgggctgctgggcggagctgggcagcgggctggagtttccgggcgccgagggccaatggacgcgcttccccaagtggaacgcctgctgcgagagcgagatgagcttccagctcaagactcgcagcgcccgcggcctcgtgctctacttcgacgacgagggcttctgcgacttcctggagctgattctgacgcgcggcggccgcctgcagctcagcttctccatcttctgcgctgagcctgcgacgctcctggccgacacgccggttaacgacggcgcctggcacagcgtgcgcatccgccgccagttccgcaacaccacgctcttcatcgaccaggtggaggccaagtgggtggaggtcaagtccaagcgcagggacatgacggtgttcagcggccttttcgtcggggggctgcccccggaactgcgcgccgcggcgctcaagctcaccctggcctcggtgagggagcgggagcccttcaaggggtggattcgtgacgtgagggtcaactcctcgcaggtcctgcccgtggacagcggcgaggtgaagctggacgatgagccgcccaacagcggcgggggaagcccgtgcgaggcgggcgaggagggcgagggcggggtgtgcctcaacggaggtgtgtgctccgtggtggacgaccaggccgtgtgcgactgctcgcgaaccggcttccgcggcaaggactgcagccaagaagacaacaatgtggaaggtctggcgcacctgatgatgggcgaccaaggtaaaagtaaaggaaaagaagaatatattgccacgttcaaaggatctgaatacttctgctacgacttgtctcaaaaccccattcaaagcagcagtgatgaaataactctgtcatttaaaacccttcagaggaatggactgatgcttcacactgggaaatcggctgattatgtcaatcttgccctgaaaaatggagctgtctctctggtcattaatttgggatcaggggcctttgaagcactagtggagcctgtgaatggaaagtttaatgataatgcctggcatgatgtgaaagtcaccaggaatctgcgtcagcactcaggcattggacacgctatggtgacaatatcagtggatgggattcttaccacaacgggctacacgcaagaagattataccatgctggggtctgatgactttttctatgttggaggcagtcccagcacagccgaccttccagggtcaccagtcagtaacaactttatgggctgtctcaaagaggttgtatataaaaataatgatgtgaggctggaattatctcgacttgccaagcaaggagatcctaagatgaagatccatggagtggtggcatttaaatgtgagaatgttgcaactttagacccaatcacctttgaaaccccagagtctttcatctctttgcctaaatggaatgcaaagaaaactggctccatatcatttgatttccgtacaacagagccaaatggcctcatcttatttagccatggcaagccaagacatcagaaagatgccaagcacccacagatgataaaggtggacttctttgctattgagatgctagatggccacctctacctcctcctggacatggggtcaggtactataaaaataaaagccctgttgaagaaagtgaatgatggagaatggtatcatgtggacttccagagagacggacggtcaggtaccatttctgtcaacacgttgcgtactccctacactgctcctggtgagagtgagattctggacctggatgatgagttgtacctgggggggctgccagaaaataaagctggccttgtcttccccaccgaggtgtggactgctctgctcaactatggctacgtgggctgcatcagggatttgttcatcgatggccaaagcaaagatatccggcaaatggctgaagttcaaagtactgctggagtgaagccttcctgctcaaaggaaacagcaaaaccgtgccttagcaacccttgcaaaaacaatggcatgtgcagggatgggtggaacagatatgtctgtgattgttccggaacaggctatcttggcaggtcctgtgagagagaggcaacggttttgagctatgatgggagcatgtttatgaaaattcagctccccgtagtcatgcatacggaggctgaggatgtttccttacggttccgatcccagcgtgcatatggcattctgatggcaaccacttctagagactctgctgacaccctccgcctggagctagacgcaggacgtgtgaaactgacggtcaatctagattgtatcaggattaactgtaattccagcaaaggtcccgagactctttttgctggctataacctcaatgataacgagtggcacacagtgcgtgtagttcggcgtggaaaaagtttaaagttaacagtggatgaccaacaggccatgacaggtcaaatggcaggtgatcatactaggctggagttccataacatagagactggcatcatcacagaacgacggtatctttcttctgtcccctccaacttcattggacacctgcagagcttgacatttaatggaatggcatacattgacctgtgtaaaaatggcgacatagattactgtgagcttaatgccagatttggcttcaggaacatcatagcagatcctgtcaccttcaagaccaaatcgagctatgttgccttagctaccttgcaagcctacacttctatgcatctttttttccagttcaagacaacatccctagatggattaattctatataacagtggggatggaaatgactttattgtggttgaattagttaaagggtacttacattacgtgtttgatttgggaaatggtgctaacctcatcaaaggaagctcaaataaacctctcaatgacaatcagtggcacaacgtgatgatatcaagggacaccagcaacctccacactgtaaagattgacacaaaaatcacaacgcaaatcaccgccggagccaggaacttagacctcaagagtgacttatatataggaggagtagctaaagaaacatacaaatccttaccaaaacttgtacatgccaaagaaggctttcaaggctgcctggcatcagttgatttaaatggacggcttccggacctcatctccgatgctcttttctgcaacggacagatcgagagaggatgtgaagggcccagcacaacctgccaagaggactcatgttccaatcaaggtgtgtgcttgcaacaatgggatggcttcagctgtgactgtagtatgacttccttcagtggaccactctgcaatgaccctgggacgacatatatctttagcaaaggtggtggacaaatcacgtataagtggcctcctaatgaccgacccagtacacgagcagacagactggccataggttttagcactgttcagaaagaagccgtattggtgcgagtggacagttcttcaggcttgggtgactacctagaactgcatatacaccagggaaaaattggagttaagtttaatgttgggacagatgacatcgccattgaagaatccaatgcaatcattaatgatgggaaataccatgtagttcgtttcacgaggagtggtggcaatgccacgttgcaggtggacagctggccagtgatcgagcgctaccctgcagggcgtcagctcacaatcttcaatagccaagcaaccataataattggcgggaaagagcagggccagcccttccagggccagctctctgggctgtactacaatggcttgaaagttctgaatatggcagccgaaaacgatgccaacatcgccatagtgggaaatgtgagactggttggtgaagtgccttcctctatgacaactgagtcaacagccactgccatgcaatcagagatgtccacatcaattatggagactaccacgaccctggctactagcacagccagaagaggaaagcccccgacaaaagaacccattagccagaccacagatgacatccttgtggcctcagcagagtgtcccagcgatgatgaggacattgacccctgtgagccgagctcaggtgggttagccaacccaacccgagcaggcggcagagagccgtatccaggctcagcagaagtgatccgggagtccagcagcaccacgggtatggtcgttgggatagtagccgctgccgccctgtgcatccttatcctcctctatgccatgtacaagtacagaaaccgggatgaaggctcataccatgtggacgagagtcgaaactacatcagtaactcagcacagtccaatggggctgttgtaaaggagaaacaacccagcagtgcgaaaagctccaacaaaaataagaaaaacaaggataaagagtattatgtctgatcccaagatcttaaatggacacttgtatagaaatagtcttcattttatctgagacataatataaacttatttactttcctttttatgaagcacatacaaaagaagacagggaatgcaatcaggaaggaaagactttttaaaaaataaaaacaagtatctcatgctcttgtttctcaaaaaagaaaaacaaaaaacaaaaaacaggggccaataaattccctaacatccacagtgttttcatttactctgcttgtctttatgttgctggaacatttctaaaagacagtgatgaccgcacgcattcataaagcaaaggagtactacagcatcaaggcacaacacaaaaaccaacacaaaacataacacaaaaaagaagctacctatgatcctggatttagccaaagtgctagcgctttcctgagaagtcagtccaattgccagagaagactgtccttttgagtgactcaacctgcaaacctttaagagtttgccgcctggtgcaactggagcagtggttggaacttgcatttgaaacaaagtgctggcttttttgaagacttgtgtaggaacacattcaaaaagcccctttctggttgtgagagaggaaaaaaaagtatggaggccttattttcaaaaatgtgaaatataaggcacgttttcacacaaaatttcaaaacaaaaacaagagggcatagatgcaatcattgggaaattttcatgcacgcttattatgttattacatatgtttatataaaatccatctctgtgtgctttctggactgtgataagtgacgttttatagcctgttgtatagaaaatgcaaaatatatctctgctcttcagccatttttggtaaattcaatgttataagtgttgctaagtatagggagttttatgacatcagagcaacaattatttcagttgggtttttctttttttttgccaccattataaattgccacaattacttttattttttaaagaaattacagtgtagtgtttattctaaggaagatatgtatgaatgtatatacaaagactcagctacttcttttcttatatgtacagccttcattctgttgcaattaagttttagtacttgtatgaaaggtgtgaattagaaagtcacatatatacatatgtatcttataatcttttctccctgaaatactcacattcccacatacattcactattttcacacacacacacacacacacacacacacacacacacacacacacacgaatccacagcaatccatcagatatgctggaagatccaaacgtgcatacagtagcaaatatttattgacaaattgaaaagcaggaaggaagagggttgtgccaaggtattgatgacaaatggggtgatttgcttcattgagatcttgctcccaggtaaccttaagaagattttagtccctaaagaaatgaacctttccttatcaaatagaatatcactgatatactgctgcatgaataagaaccattatgtgggcaggttatggaagcaaaattggttaatctacaccttaactctggctgctgcaattgaaaactttctttctaataaaataatatatatatctctgaatctgatgtgcatgatgaacatttctggaaagtaaacactttctctcgactaagaaagtatttttcagtaatttttgattctgtattactacccacttaaaaaatcattctctgttaattattgactatgttttaacttttctggttttacatatatatcattaaatatagttttagtttaacacattaagtagtggaaaagtatagattatacacttgttttgcatattattcaatgatgttcacagcaataaattactaatatgagaaggtagtgcaaaaaatgcattattacattgcaagttgatgtttcaggaaaaattggttgcattacttgaataccttctaaaagaacgataaaaaattttgtagaagagaagaatatctttccaattagctttaatcagcaaaggcaaaaaatgcaaaacatcttttgtgatactttagttgatgaaaaaaaagccaagaagtggcctggatttcagacatacagcaccttagaaatatgtataattcatagcaaatcaccactatctatggttgccaagtaattgttgtgtacaaagaaatttagtggctttttatgacccagaaagtagaaggtataaaatgaaaatttaatatccattgcttcttttctagattttcattttttttaatttgccacattaaataattcacgagtcttttcttttcccccgtctcattcagtcttactcagggaaagccagttaaataagaagggaagtgtaaaactactaatttacagcttgaagggtttttttttttaagattgcttttctattttatctattaagcttgaaccagtttccatctggaaagattctaaaatataatagaaaataaattgaataatggtaattttaagcagtatatctatgaaatgtgttgtttgggattgatttcaatgtttctccccagcgtaaattttaaagttacatgcaatgattgatatagtttattatcagcaaaattatttctaatattattggcttacacaaactctagcaaaaattattttttcctcaatggaaaaagaaaagagaggaacagagttagaaagagaaaatgacttgaatcccaagtatcttcataccaaacatatcagggttccctgcatagtttgcagttgattgaggatttcacacgacttggcataaatttgattacatctctagactgtaacttttctgattgattatgcttcttttttatccatgtaatgtgttgccttttttaaaagaacaaatactacaataacgtgtgaagtggtcaatccctaagacatcaaagaaaggccacataaccctacccttctagtgctttgtgtgattgggtatcaaaggggttttcttcttctttttttgtttgtttgtttttctgttgcaaggccaatttatccattattggaaatgctaagcaagtggaatttactgttttgttaataaaatatttcttaatacaactgtgatttattgattttaaaaattatatgcggcaccatttcgtgcttaagtgggaaagtaaagaaggctgcatttgaagggaagacccatccttatattatagaggaagaatgttgactctcttttttctggatttaactagtcattaaagacctctatattcatacacttaaagatgtagccattaaatgtacttttgttatatttgttcatcttgatatgccagaaaccataaactcatacagtattagttgcaaacaatattaaaatactaatttcataaatatgctttttctctataaaagacaatggaatccaagttaagtaaacctgtgattaaattccaacactatcacaaaaaaaaaaaaaaaaaaa

SEQ ID NO: 340 - DNA, 3277 bp, Homo sapiens
actacttctgcgcctgcgcgaccgtgattccccgctcgcgactccccaccccccagggctccctaaagagggccacgagctgcgaaagggcgggaaaggcagttggagaagaggtaagcggttactcactccatggctgcagcaaggagaggcggcggcggcctcggctgaagaaagaaggtgggagcggagagcgcaggcgtgaaatcttcccaaggctgcagacaccgacggatttgctttgggagccagagtagctgccgccaccagagtccggagccatgagcgggtttaattttggaggcactggggcccctacaggcgggttcacgtttggcactgcaaagacggcaacaaccacacctgctacagggttttctttctccacctctggcactggagggtttaattttggggctcccttccaaccagccacaagtaccccttccaccggcctgttctcacttgccacccagactccggccacacagacgacaggcttcacttttggaacagcgactcttgcttcggggggaactggattttctttggggatcggtgcttcaaagctcaacttgagcaacacagctgccaccccagccatggcaaaccccagcggctttgggctgggcagcagcaacctcactaatgccatatcgagcaccgtcacctccagccagggcacagcacccaccggctttgtgtttggcccctccaccacctctgtggctccagctaccacatctggaggcttctcattcactggtggaagcacggcccaaccctccggtttcaacattggctcagcagggaattcagcccagcccacggcacctgccacgttgcccttcactccggccacgccagcagccaccacagcaggtgccacacagccagctgctcccacacccacagccaccatcaccagtactgggcccagcctctttgcgtcaatagcaactgctccaacctcatctgccaccactggactctccctctgtacccctgtgaccacagcgggcgcccccactgctgggacacagggcttcagcttaaaggcacctggagcagcttccggcacctccacaacaacatccaccgctgccaccgccaccgccaccaccaccagcagcagcagcaccaccggctttgccttgaatttaaaaccactggcgccagccgggatccccagcaatacagcagctgccgtgaccgctccacctggccctggcgcagctgcaggggcggctgccagctccgccatgacctacgcgcagctggagagcctgatcaacaaatggagcctggagctagaggaccaggagcggcacttcctccagcaggccacccaggtcaacgcctgggaccgcacgctgatcgagaatggagaaaagatcaccagcctgcaccgcgaggtggagaaggtgaagctggaccagaagaggctggaccaggagctcgacttcatcctgtcccagcagaaggagctggaagacctgctgagcccactggaggagttggtcaaggagcagagcgggaccatctacctgcagcacgcggatgaggagcgtgagaaaacctacaagctggctgagaacatcgacgcacagctcaagcgcatggcccaggatctcaaggacatcatcgagcacctgaacacgtccggggcccccgccgacaccagtgacccactgcagcagatctgcaagatcctcaatgcgcacatggactcactgcagtggatcgaccagaactcggccctgctgcagaggaaggtggaggaggtgaccaaggtgtgcgagggccggcgcaaggagcaggagcgcagcttccggatcacctttgactgagcgacagcagccctggggcccgcaggtccctagggagttcatgaggggaatgcgccctgttgtctgtagtttggggttgtggcaagatacttgtttgtttctttctttctttcacatgactgcccttgacatgatcgctgtgtgctttgcgtttttccatttaggagggtattctgggccttctgcccaggcagcagcctcatgggtgtggcttctgtggctttcatttgagtatctttggccccttttcacctactgcgaccacccacctcatcctggctcagcctggtgatggagaagtgctgatggtcttggtcccagccagggtcgtgggggcagccactctctccaaagcatagtcataggtgtcatgaaaaaataccaaatgtaagagaacctccaagtcagggcgcagtggctcacccctgtaatctcagcactttgggtggccaaggcgggcagatgacttgaggtcaggagttcgagaccagcctggccaacatggtgaaaccccgtctctactaaaaatacaaaaattagtcaggtgtggtggacgcctgtgatctcaatctcagctactcgggaggctgaggcaggagaatcacttgaacccaggaggtgttgcagtgaaccaagatcacaccactgcactccagcctaggcaacagagactctgtctcaaaaaaaaaaaaaaaaaaaaagaaactcccaggagacagcagcctagttttcgagtgtgagcttgtgcttgtgaaagctaaccatgctaaccaccaaggcaaagcagcacagtgtgaatagaacagagcgggatcaagaatttcacagaagacaggtcagctgaggggcctgcacacacagggtgttgaggaaccacagatgggcgccgagaggcctgccttttgcctggcccaggctcacccccaccttgggcctcacctcctccaggaagccttcccagctacccgaagctcaggtggccttcttgcaggtccccgtagcaccctgagcctgtaccttgggtggcacttgttatgctatcctgtgctagccgtttgtgcctcgtctcgctgttagattgtgagttcccatgggcagagacccactgtcgttccccgtgtgtccccagcccggtccctgtcacatttgttaaatgaaagaacaatgaagcccagtgtaacgtcagtccacagaaatagccacagcttccagtggtggccgtagacttggctcggaacttagtggcaccagagtaactctagtcagttacagtaaaatccactgtgtgtggaaggcagaagctagcggttgtatcccaagcatcttttgtatttgtctttatactttgctgaattctctgaaatacctattactgtatgttgcttttctaaataaatgtattgtgaaaccaaaaaaaaaaaaaaaaa

SEQ ID NO: 341 - DNA, 1468 bp, Homo sapiens
gcctcgcagccacccctcctgcgtctccacaaatggtccgacccgcaagcaagggggcgggtccggctttgaaaagccggcgggtcgggccttgaggtggaaggcgggaaaatggcggattcctcggggcgaggcgctgggaagcctgcaaccggccccacaaattctagcagtgccaagaagaaggataaaagagttcaaggtggaagagtgattgagtcccggtatctgcagtatgaaaagaagacaacccaaaaggctcctgcaggagatgggtcacagacccgagggaagatgtctgaaggtggaaggaaatccagcctgctccagaaaagcaaagcagatagcagtggggtcggaaagggtgacctgcagtccacgttgctggaagggcatggcacagctccacctgacctggatctctctgctattaatgacaaaagcatcgtcaaaaagacgccacagttagcaaaaacaatatcaaagaaacctgagtcaacatcattttctgcccctcggaaaaagagcccggatttatctgaagcaatggaaatgatggagtctcagacactactgctgacgctactatccgtaaagatggagaacaatcttgctgagtttgaaagaagggcagaaaagaatttattaataatgtgtaaggagaaggagaagctacagaaaaaggcccacgagctgaagcgcaggcttctcctctctcagaggaagcgggagctggcagatgtcctggatgcccagatcgagatgctcagccccttcgaggcagtggccacacgcttcaaggagcaatacaggacattcgccacggccctggacactaccaggcacgagctgcccgtgaggtccatccacctggagggagatgggcagcagctcttagacgccctgcagcatgaactggtgaccactcagcgcctcctgggagaacttgatgttggtgattcggaagaaaatgtgcaggtgctggacttactgagcgaactcaaggacgtgacggcgaaaaaggaccttgagctccgaaggagctttgcccaggtgctggaactctccgcagaggcaagcaaagaggcagccttggcaaaccaggaagtctgggaagagacccagggcatggcgccccccagccggtggtatttcaatcaagacagtgcctgcagagaatctgggggagcacccaagaacacgcccctgtctgaggacgacaacccgggtgcctcgtcagcccccgctcaggccacgttcatcagcccaagcgaagatttttcttcaagcagccaggcagaagtcccgccctctctctctcgttcagggagggacttgtcatgactcatggttacattcaggatacttgagcactttatatactaccgtagcactgtagctattttttatgtgataatcttgtttgataaaaaagtaaacctgttttgcaattgaaaaaaaaaaaaaa

SEQ ID NO: 342 - DNA, 3465 bp, Homo sapiens
gcagcgtgacttcacaaggggaggggcgggccgagggtcctgccggcgcgcgggcgtgttcatcagtcgctgtttgggacgctgggtgtgcggtgttctgtctccgctcccgtttcgctgtcacagcccgttccttcccggagcccgggacaggctgggcgcgcgcccgtgacgcgtgaccaaaaccaaagacggccatgaagtgagatcgtgcaaagtagcagataaaacgggcagcatcactatttccgtgtgggatgagatcggaggtcttatacagccaggggatattattcggttgaccagagggtatgcatccatgtggaaaggatgtctgacactttatactggaaggggtggtgaacttcaaaaaattggggaattttgtatggtttattcagaagtgccaaatttcagtgaacccaacccagattatcgaggacagcagaacaaaggggcacagagtgaacagaagaataattccatgaatagtaatatgggtacaggtacatttggaccagtgggaaatggtgttcacactggccctgaatcaagggaacaccagttttcacatgctggcagaagcaatggccggggacttataaatccacaactacaaggaacagctagtaatcaaacagtgatgaccacaataagtaatggcagggaccctcggagagcctttaaaagatgacctatgctaaatactcatgtgtagtttttatactacatgccctacttgaacacttattgcacttttatttattgttaactgtgaaaagtacgtcctttattgggtttccttttatattcttggtttgttaagaagaatggtttgtttttatagcaaaactgttaagctgctcgagtctcctgttgaagaatgggaacactgaaaagtaggggcatttatttttagagtaaaaagattattggatagcctttaaaaaacctgcacccatttcatgggtgagttacttaagacatcagctttatagcctctatgagtctatcttctgtataagttttgtaatatttaacataaggcttaatgggagatgttcttttgtcttgtattcagatattgccaactaaagcaataaccatcaaaaaacacaagaacttgtcaatgctagcagtaatttttgagtgtttgtggctctcggaatgattgacttcgttcagtgactactattaagattttccaaggactgactcatcccaaatttttgttgtattaccaaaaaaacagattccttatcagaatttggaatagaatgtgatctctattgcaacaagtaattttaaaagaaagctacatttattttagagtagtgctcctaacatgtattatcaactttgtggattacattggaggaaaatttaaaactggggccttgaatatttattttttgaaactaccatgttaaatactgaagtataatttgggggagttataaagttatgataaacattcatctgattattttaaacaatagttgtggtagataaacatactggaggtgagtcaaattgaattcatatagtaacatgcagtctgaagtcctagttacttaataggtactcagcctggagtgaaaatcctgggtactgactttgagaggagtgagtgtgcatgttgtcaaagtttctgaacacagttcacatagccttattagcaaaagttttaagaaatggctctatcaaagaagcaattgcagctttattcagaaatataaaagtggaatttatgtacatgtcataagtggtacccacttcccctttttactgtagggtggataactcttaggatttaactctttgaatattatctcttgaataaagcatgtgttaatgttaacaaacctacgtaatttttgccctttcaatgacttacagtggagagccagtacatcttaactactgttgtagtgatggtatcaacctcatggttacttagctctgcatttgttgctttgttttttttccacttcaaatcacaaaataagtagattttgttttctgaaaactccatagcatttgaatacaaaaagttgtgccagattgtttgccctaattcactgtgtttaacaaatatttcagtacacactatgtattaggcactgtgtggaaagtgttaaggggtagacaaaataccgaataatctccacaagtttatttgtggtctatagtacttttgtaactggggttacaaaaattatagaaatttttttcctttgttcatatgcatattcatgattataatttggctttgtttgtgattaatgttttcttaagattttcacattatagaatacctcaaaagaagttgtctaaggactgggatagagagtatgtttcataaaattgtagatgtttagaatttttaaaaaccctacaaattagtatatgattgttttatataagtaagataggagcaacactttaaattatttgtgggagaatacagcattaaaggtgattttaaaagaaaaaaatttggaattttagaaaatttaaatgctgtcaggtatggaatgctgggcttccaatcctggcctcattgtctcctcacctgtgatgttggatgagttattacacttgaaatgtctttaagccttaggttccacaagtatgaaaacaagtaagtaacagtatcctttctagacttgtttaagatttccatgtaagtaattataatgacttctgacacataataatgtcgtcttataccccaacagtaggaaaaaaatgcagaattcagtatgaaagtattgttaccctttaacacagtggtccccaacctttttggcaccagagaccagtctcctggaagacagtttttccgtgggatcgggggatggttttgggatgaaactgttccacctcaggtcatcagtcattagttagattctcataaggagcgtgcaacctcaatcccttgcatactcatttcacaatagggttcatgctcctatgagaatctaatgccaccactcatctgacaggaggtggagctcaggcagtaagtctccctcgcccgccactcacctgctgggcgttcctgttcctagcaggccagaattgatactgatctaggggttggggacccctgcttaacatgttgagattaaatggagaaagacttaagcttttacttttgtgattgacacttgcttcaataatgtaaccttgttctgtgtttttatcatttattaacaaatttcttttttcttaagggaagcctccaaaatcaaagaaaagtgagttacaatccataatgaatatttgccttaccagcctactggaacacattcatcaagaacttaagaggaagaaagttttctgccttcctccttcctagtgctctcagctatcaactttgaaataagtttaaacaacacctactgaaaacaaaaaccacttagtataaaaatatcccccaccaaaaaaaaaaaaaaaaaa

SEQ ID NO: 343 - DNA, 5254 bp, Homo sapiens
atggtttccagatgtagctgcctgggggtccagtgtctgctgctctcgcttcttctcctcgcagcctgggaggtggggagcggccagctccactactcagtctacgaggaggccagacacggcaccttcgtgggccgcatcgcgcaggacctggggctggagctggcggagctggtgcagcgcctgttccgggtggcgtccaaaagacacggggaccttctggaggtaaatctgcagaatggcattttgtttgtgaattctcggattgaccgcgaggagctgtgcgggcggagcgtggagtgcagcatccacctggaggtgatcgtggacaggccgctgcaggttttccatgtggacgtggaagtgaaggacattaacgacaacccgcccaggttctccgtaacagaacaaaagctctcaatacctgaatccagactgcttgactctcgatttccactagaaggcgcatctgatgcggatgttggagagaacgcattgcttacttacaaactcagtccaaatgagtattttgttcttgatattataaacaaaaaagacaaagacaaattcccagtgcttgttctgcggaagctgctggatcgtgaagaaaatcctcagctaaagttgttgttgacagcaactgatggaggcaaacctgaatttaccggatctgtttctctgctgatcctggtgttagatgccaatgataacgcccctatctttgacagaccggtttatgaagttaagatgtatgaaaatcaagtgaaccaaacattagtaatacggctcaacgcttctgattcggatgaaggaataaacaaggaaatgatgtattcatttagctctttggtcccacccacgataagaaggaaattttggataaacgaaaggacgggagaaataaaagtaaatgatgctattgactttgaggacagtaacacttatgaaattcatgtagatgttacagataagggaaacccacctatggttggtcactgcacggtcctagtggaactactggatgaaaatgataattcacctgaggtgattgtcacttctctgtctctcccagtgaaagaagatgctcaagtgggcaccgtcattgccctaatcagcgtttctgaccatgattcaggagccaacggacaggtcacctgctctctgacgcctcacgttccgttcaagctggtgtccacctacaagaattactactcattggtgctggacagcgctctggaccgcgagagggtgtcggcctatgagctggtggtgaccgcgcgggacgggggctcgcctccgctgtgggccacggccagcgtgtctgtggaggtggccgacgtgaacgacaacgcgcctgcgttcgcgcagtccgagtacacggtgttcgtgaaggagaacaacccgccaggctgccacatcttcacggtgtctgcgtgggacgcggacgcgcaggagaacgccctggtgtcctactctctggtggagcggcggttgggcgagcgctcgctgtcgagctacgtgtcggtgcacgcggagagcggcaaggtgtacgcgctgcagccgctggaccacgaggagctggagctgctacagttccaggtgagcgcgcgcgatgggggcgtgccgcctctgggcagcaacttgacgctgcaggtgttcgtgctggacgagaacgacaacgctcccgcgctgctggcgtctcccgctggcagcgcgggcggtgcagtcagtgagctggtgctgcggtcggtggttgcgggtcacgtggtggctaaggtgcgcgcagtggacgctgactctggatacaacgcgtggctgtcgtatgaattgcagtcggcggcggttggtgcacgcatcccgtttcgcgtggggctgtacacgggcgagatcagtacgacgcgcgctctggatgagactgactcgccacgccagcgcctactggtgctggtgaaggaccatggcgagccgtcgctgacggccacggccactgtgcttgtgtcgcttgtggagggcagccaggcacccaaggcctcgtcgcgggcttcagtgggcgtggcgcccgaggtggccctggtggatgtcaacgtgtacctgatcatcgccatctgcgcggtgtccagcttgctggtgctcacgctgctgctgtacactgcactgaggtgctcggcggcgcccaccgagggcgcatgtgggccggtgaagcccacgctggtgtgctctagcgcggtggggagctggtcttactcgcagcagaggcggcagagggtgtgttctggggagggcctgcccaaggcggacctcatggccttcagccccagccttccaccatgcccaatggtagatgtggacggggaagatcagtctattggaggggaccactctaggaagccacgacagcccaaccctgactggcgttactctgcctccctgagagcaggcatgcacagctctgtgcacctagaggaggctggcattctacgggctggtccaggagggcctgatcagcagtggccaacagtatccagtgcaacaccagaaccagaggcaggagaagtgtcccctccagtcggtgcgggtgtcaacagcaacagctggacctttaaatacggaccaggcaaccccaaacaatccggtcccggtgagttgcccgacaaattcattatcccaggatctcctgcaatcatctccatccggcaggagcctactaacagccaaattgacaaaagtgacttcataaccttcggcaaaaaggaggagaccaagaaaaagaagaaaaagaagaagggtaacaagacccaggagaaaaaagagaaagggaacagcacgactgacaacagtgaccagtgaggtcctcaaatggaaacaagccacttagccagtttttgtaataatggcaaatctctcccatgtagcaattccctgctcctttttcctatctacatgagccctcttagagacctcagaaatctgcagaaagttccctgtgtctgtctagaacgcatttaacaggttttgtcgtaaaagctttactaagtctggtgttaactctttctctccactctggcttgttttcagaacctaaaaagcagacccaagtttcctttctcctccgccgcaaaggagaggcttcccagccccgccagtgagaggttggactctctgccctgtgctccggggatcctgtcttgatgacacttgcagggcaggctgaaaagttttgagattgagcagcttgggagtttgtggccactgggtatgtgtggctaccgcgggtatgcgagtgccagatattggctgagacgagccagcttagactaattggtacaaggaaggcaagaaaacaaagacaaataaacagcggaagttatcagtatggaggggaagtgtaaacttaaagggaccagactttctaaatcttacaactcaagaggtggcagccaccctctaggagacaaaactacccccactgacaaggctttaggagaccctaaagtctgttggctgtgacgtcattatacctaaaatctgcatcatacctgcaagccaacagttcagtgttttaacagagaaccaccctgggaaacagaagcagatctgatgtgtttcctatacatgtcctgtgctcactttattaaaaattcttttgcacacaatgtttatgaaaaggccagatccttttccaatacttatgcaaaagcaaaagaaaaccccgacacctcacctttcgctgtttgttgtttcatagatttatttaaaaaaagagaaagtctatagctataaatctttaaagagaaatatgaatacaattcccctaaactctcctcaaaagagaattcagtctacagccatttaaatgatcattgctgctacagaagtgctttaagagaattgcctgaaacatctgtattatatcggccacctgccaatcacagctttactctttcaggtcactctggggctgcctcttgcatgtattactaaataaaatgatctctctttctctctctctctctcttttctaagaaacaattatgtgcactttgatacacaaccttctctaaccaactatatatcaagacccaaaaattgaagaaaaatattgttttctcatacagtgagcagatttttcaatctactaattctgtgacttgtcttggtgtgctagcctacaccttctctttggtttagttttccttttctataacactctgaattgctaatcttactaacacctatgatgttacctgaaatcaatctcccatatgtatgctgtatgctatgctaagactcctgaaatatacttactctgtgcttgtgtatgtgaatgttaatgcaactattacctagagtgaactttaagctttattgttgaatgtaattccattatatttccttttgtacacctgtgaaaaagtggagtagtgtttttttaaccattgttaatcagcttttgtgtatgaaagacacagtaaaatttctttcttaaatcaagatactggtgattcaaggaattttatttatggtccagccaagagccatctcgtgccaagacttctgctggcaagggaatggataaagctgttttgttctagtaacaattttggaatgaatactgacaatattccatgagggtgtgcaagcacaaattttaccaatctgacctctttgaagttgcagaatgctttgaaattctaatggtatctgaaatatcagctcatagaaagtaacaaaatttgctgtcaccttaaataagacattttaattttgttataatgtacaatttagaagtttgattaattatattatctatttaggcattaatataaaagaggtaggagtctgttatttaaaaaaagcattaaatttaaaaaaaaactgtcttgtctacttttagcttcattctcccatattttgaagggtgtgtaacttcagctctgcaggattgcatggggtaaaacttgttaccaacacatgtgaaccattgctacattgtaggttgtgatcattttgccccactgaagcccatgtatctgaccttacgtgccttttgaactaggagaatcgggctaatttattaatgatgataattataatgtatctgtacagcactttttacatttgcgaagtgctttccaatccatgttagttactagttattacagctgtaaggataaaacacgtcatgtggattcattttgaattggtgctattggtatttcctctgttattgctaataaatgaaaatggtggtatg

SEQ ID NO: 344 - DNA, 2828 bp, Homo sapiens
agaccaccttgcggccgaccccgctcccccgcctcctcgggagagataaatgctgactccgctcggaaagttctcaactgcaaagtttgctgtccggctgcctagggtctgggaagctcgggcaccctccctctccggggctcctgctcccacccctccggcccccccaccgtcgcgctcctccaggctgggcctgtggccgcggtgctttttaattttcccccagctcagaatcttgctgctcggcccccaggagagcaacaactcaacgggaacgatgtggaaggtgtcagctctgctcttcgttttgggaagcgcgtcgctctgggtcctggcagaaggagccagcacaggccagccagaagatgacactgagactacaggtttggaaggcggcgttgccatgccaggtgccgaagatgatgtggtgactccaggaaccagcgaagaccgctataagtctggcttgacaactctggtggcaacaagtgtcaacagtgtaacaggcattcgcatcgaggatctgccaacttcagaaagcacagtccacgcgcaagaacaaagtccaagcgccacagcctcaaacgtggccaccagtcactccacggagaaagtggatggagacacacagacaacagttgagaaagatggtttgtcaacagtgaccctggttggaatcatagttggggtcttactagccatcggcttcattggtgcaatcatcgttgtggttatgcgaaaaatgtcgggaaggtactcgccctaaagagctgaagggttacgccctgctgccaacgtgcttaaaaaaagaccgtttctgactctgtgccctgtccctgagctcgtgggagaagatgacccgtggaacacttgcctggcccactcagaatccacggtgacctctccgcttgccaaaataaccgaaggaaagaccgttcaccagacttggctcctctaaacatttgctgttcaaacatgtttttgaatatacattctataaaagattatttgaaagacaaaattcatagaaaatggagcaaaactgtataaactgatttgtaactaacactggaccattggatcgatattatatgctgtaaccatgtgtctccgtctgaccattcttgttattgttaaaatgcagaggaatctggaaatatttatatccacggagtccttggatccagtgctacgtcagtaaatagcaccagcattttgcaattgctgatctgctgaaatgtacacattctggtctagtttggtctatcttttaaagcctgatctggtgtgaataatcaactaggaaatctaaacttggataacacgtggtgaacaactgcctttagctggtccagattaatcatttcaaagacatccattttagatcacaagcaggaagtcgatagtctcaaaggcactttgtttctcccaagtaggccaccaggcagcctctagagttgctttacccaaatccttctccagccatgacttggtgactctaagcttgctcccacctgccccctccacttccctcagatgatgaggagccagggctaagggggcagccttctctcttcccagtgatgcacatccttcacattggctgctttgttctggaatatggatatctcagcctggatgccgaggaagctgctggatgcttaatggtgctagaggctcaagtgtgtttgaaaccaagagccagttgtcccccatgcagaaagaaatcctgtgtgagcctctggtatgagaaataaaatctgccagttttataacattcactttctgcctctgaggaaagatacagggaacaaaaatcaatttgtacagtcttaatattaaaagcagcttgactaaatacctgatttaaaaatagaagacatccccagtcctcatgacataccgcaaatatctgtggggtcctgttgaaaagaacaaaataaaggagcccaaggggtcattctgtctcagcaccatccagcctggcacttctcttcccatatatccattggatttttttttttttttcctaaacaaagtttttacactgagcagatgctctgtcatgatggcggttgtgcaattctggtatcctctaaatttgtaagcattcataaaacaggaaaaagtaaactatcattcggaagcacagcccattcctcccattttttgcaatgatgtctggatgttattttaaacagtgtgtctgtgtgttcccaaatccagctggccccaccagctcagattccattttttttgtgtgtgtgtgtgaaacgtagtctgcaactctgcctcccggcaattatacatgtgtcaggatgtcaaaaagcaattctcctgcctcagcctcctgagtagctgggactacaggttcctaccaccacacccggccaatttttgtatttttagtagagatggggtttcaccgtatcggcgaggatgatctctatctcttgacctcgtgatctgcccgcctcggcctcccaaagtgctgggattacaggcgtgtgccactgcgctcggcctcagattccatatttgaacaccagctgattgagagaaggggaatgagaagagctggatgagtttaaataactcattgttcagattcctgaacaggagttgggataatggccatcttttctttcctatcctttcttcccccctcactgtgaaaaataacagtccaccccaagtcatacactggacccagtgcctgcggggacaggactgtgggtttcttggtcacacctgtgttggtgctcaatgcagtgtagacatgttttcaaataaaacaaatgattgtgtacaaaaaaaaaaaaaaaaaa

SEQ ID NO: 345 - DNA, 2198 bp, Homo sapiens
gaagatgacgaggtggagggggcagaggcggacctgtctggagatggtactgactatgagctgaagcctctgcccaagggcgggaaacggcagaagaaagtgccagtgcaggagattgatgatgactttttcccaagttctggggaagaagctgaagctgcttctgtaggagaaggaggaggaggaggtcggaaagtgggaagataccgagatgatggagatgaagattattataagcagcggttaagtcccaagatgcctcgaacactaagtttacatgaaataactgaccttttagagacagatgacagcatagaagcaagtgctatagtgatacaaccacctgaaaatgctacagcacctgtttctgatgaggaatcaggagatgaagaaggtggaacaataaataatctgccaggttctttgttgcacacagctgcgtatcttattcaagatggctctgatgctgagtctgactcagatgatccctcatacgcacctaaagatgactctcctgatgaagttccatctacgtttactgtgcagcaacctccaccatcaaggaggaggaaaatgacaaaaattctttgcaaatggaaaaaagccgacctaactgtacaacccgtagcaggtagagttacagcaccaccaaacgatttcttcaccgtaatgagaactcccacagaaattcttgaactttttcttgatgacgaggtcattgaactcattgtcaagtactccaacttatatgcttgcagtaaaggtgtacatcttggcttgactagctctgaattcaaatgttttctgggaattatttttctgagtggttatgtctcagttcctagaaggcgtatgttttgggaacaaagaacagatgtgcataatgtactggttagtgctgccatgagacgtgaccggtttgaaactatattttctaatttgcatgttgctgacaatgcaaatttggatccagtggacaaattttccaaattgcgacctctcataagcaaacttaatgagagatgcatgaaatttgttccaaatgaaacatatttcagctttgatgaattcatggttccttattttggtcgtcacgggtgcaaacaatttattcggggaaagcccattcggtttggctataagttttggtgtggtgccacctgtctgggctacatttgctggtttcagccgtatcagggtaaaaacccaaatactaaacatgaggaatatggtgtcggtgcgtcacttgtccttcagtttagtgaggcacttacagaggcacaccctggacaataccattttgtattcaataactttttcaccagtattgcacttcttgataagctcagttcaatgggacatcaggcaacaggtacagtgagaaaggatcacattgacaaagttccactggaatcagatgtagctttaaagaaaaaagaaagaggcacatttgattatcgaattgatggcaaaggcaatattgtctgcagatggaatgataacagtgttgtcactgttgcctcatctggtgctggtatccatcccctgtgtcttgtcagtcgttactcccagaaactgaaaaagaagatacaagttcagcagccaaacatgatcaaagtgtataaccagttcatgggaggcgtagacagagctgatgaaaacattgataagtatcgggcatcaatccgtggaaagaaatggtattcaagccctcttttgttctgtttcgaactggtcttacaaaatgcttggcaattgcataaaacatatgatgagaaaccagtggattttctggagtttcgtcgacgtgtggtatgccattatctggagacccatggtcatcctccagaacctggccaaaaaggaagacctcagaagcgtaacattgactcacgttatgatggcataaatcatgtgatagtcaaacagggaaagcaaacgcgatgcgctgaatgtcataagaacacaacttttcgatgtgaaaaatgtgatgttgccttacatgtgaagtgttccgttgaatatcacactgaatagcaggtgtcaccacctcctgagataagaaacatagttttatacattatgtacagtgtagcagtggttttgcctagtgttccaattttggaacgtcacataacaatggaacataataaatttttttttctcttcaaaaaaaaaaaaaaaaaaaaaaaaaaaaa

SEQ ID NO: 346 - DNA, 2294 bp, Homo sapiens
agagggcgtcttcacgcaggcaccgagaagctcccactagtgtatgccttaatggtgccgctcttgtccgcgtctacgcttgggaccttggcttctgacttggagagtgtacagctctgcccgacggcaacccagcttgggaagagaagccccagcgtgggctggggctcaaggcgcaggaaggccgagcccggcgcggacgcaggcggctccgggcgggctcagcacccccaggcaccgtctcctagtgaccgcggcgctcgcgggcctggcggccgttgtccgggcgactgcgcagcgcgggcacccccgcggcccctcccctgggcgcgcgcgcgacctgggtgccatggcggcagcggcggtgacaggccagcggcctgagaccgcggcggccgaggaggcctcgaggccgcagtgggcgccgccagaccactgccaggctcaggcggcggccgggctgggcgacggcgaggacgcaccggtgcgtccgctgtgcaagccccgcggcatctgctcgcgcgcctacttcctggtgctgatggtgttcgtgcacctgtacctgggtaacgtgctggcgctgctgctcttcgtgcactacagcaacggcgacgaaagcagcgatcccgggccccaacaccgtgcccagggccccgggcccgagcccaccttaggtcccctcacccggctggagggcatcaaggtggggcacgagcgtaaggtccagctggtcaccgacagggatcacttcatccgaaccctcagcctcaagccgctgctcttcgaaatccccggcttcctgactgatgaagagtgtcggctcatcatccatctggcgcagatgaaggggttacagcgcagccagatcctgcctactgaagagtatgaagaggcaatgagcactatgcaggtcagccagctggacctcttccggctgctggaccagaaccgtgatgggcaccttcagctccgtgaggttctggcccagactcgcctgggaaatggatggtggatgactccagagagcattcaggagatgtacgccgcgatcaaggctgaccctgatggtgacggagtgctgagtctgcaggagttctccaacatggaccttcgggacttccacaagtacatgaggagccacaaggcagagtccagtgagctggtgcggaacagccaccatacctggctctaccagggtgagggtgcccaccacatcatgcgtgccatccgccagagggtgctgcgcctcactcgcctgtcgcctgagatcgtggagctcagcgagccgctgcaggttgttcgatatggtgaggggggccactaccatgcccacgtggacagtgggcctgtgtacccagagaccatctgctcccataccaagctggtagccaacgagtctgtacccttcgagacctcctgccggcaagtatctcccaactgggggctgccttcaatcctcagaccaggaacacccatgacacaggcacagccctgcactgtgggcgtgccccttggcatggggccaggagatcactgggttatcccggtaagcccctgggagcatccacaactggggacctgctcagtgccccccctgccttacagctacatgacagtgctgttttatttgaacaacgtcactggtgggggcgagactgttttccctgtagcagataacagaacctacgatgaaatgagtctgattcaggatgacgtggacctccgtgacacacggaggcactgtgacaagggaaacctgcgtgtcaagccccaacagggcacagcagtcttctggtacaactacctgcctgatgggcaaggttgggtgggtgacgtagacgactactcgctgcacgggggctgcctggtcacgcgcggcaccaagtggattgccaacaactggattaatgtggaccccagccgagcgcggcaagcgctgttccaacaggagatggcccgccttgcccgagaagggggcaccgactcacagcccgagtgggctctggaccgggcctaccgcgatgcgcgcgtggaactctgagggaagagttagccccggttcccagccgcgggtcgccagttgcccaagatcaggggtccggctgtccttctgtcctgctgcagactaaaggtctggccaatgtcttgccccaccccgccagccgcgatacggcgcagttcctatattcatgttatttattgtgtactgactccatctgccccgtcaaataaaaaaccacaaggttcgagccgccgggcccgacaaactccgggtcggcgaaaaaaaaaaaaaa

SEQ ID NO: 347 - DNA, 3522 bp, Homo sapiens; identical to SEQ ID NO: 78

SEQ ID NO: 348 - DNA, 748 bp, Homo sapiens
gggcactttcccagtccccgaggcggatccggtgttgcatccttggagagagctgagagctggagtacagaacctgctaaggccatcaaacctattgatcggaagtcagtccatcagatttgctctgggccggtagtactgagtctaagcactgcggtgaagaagatggtagaaaacagtctggatgctggtgccactaatattgatctaaagcttaaggactatggaatggatctcattgaagtttcaggcaatggatgtggggtagaagaagaaaacttcgaaggcttaatgatgtcaccatttctacctgccacgtatcggcgaaggttgggactcgactggtgtttgatcacgatgggaaaatcatccagaaaaccccctacccccaccccagagggaccacagtcagcgtgaagcagttattttctacgctacctgtgcgccataaggaatttcaaaggaatattaagaagaaacgtgcctgcttccccttcgccttctgccgtgattgtcagttccttgagggctccccagccatgcttcctgtacagcctgcaaaactgactcctagaagtaccccaccccacccctgctccttggaggacaacgtgatcactgtattcagctctgtcaagaatggtccaggttcttctagatgatctgcacaaatggttcctctcctccttcctgatgtctgccattagcattggaataaagttcctgctgaaaatccaaaaaaaaaaaa

SEQ ID NO: 349 - DNA, 1990 bp, Homo sapiens
ccggcttgaccctgcccgggcgcgccatgttcgcgcgtgggtcccggaggcgccgctccgggcgtgcgcctccagaggcagaggacccagaccggggccagccctgcaactcctgtagggagcagtgccctggcttcctgctccacggctggagaaagatctgccagcattgcaaatgcccgcgggaggagcatgcagtgcacgcggtgcctgtggacctggaacgcatcatgtgtcggctaatctcggacttccagcgccactccatctccgacgacgactcaggctgtgcatcggaggagtatgcctgggtgcccccaggccttaagccggagcaggtatatcaatttttcagctgcctcccagaggacaaggtcccctacgtcaacagtcctggggagaaatacaggatcaagcagctgctgcaccagctgcccccacacgacagtgaggcacagtactgcacagcactggaagaggaggaaaagaaagagctccgagcctttagccagcagcggaagcgggagaatctggggcgtggcatcgtgcgcatcttcccggtgaccatcactggggccatctgtgaggagtgcggaaagcagattggaggtggggacatcgcagtgtttgccagccgtgcaggcctgggtgcctgctggcacccacagtgcttcgtgtgtaccacgtgccaggaactgctggttgacctcatctacttctaccatgttggcaaggtctactgcgggcgtcaccatgccgaatgcctgcgtccacgctgccaagcctgtgacgagatcatcttctcccctgagtgcacggaggctgagggccgccactggcacatggatcacttctgctgctttgagtgtgaagcttcactaggagggcagcgctatgtcatgcgtcagagccgcccccactgctgcgcctgctacgaggcccgccacgcggagtactgtgatggctgtggggagcacatcggcctggaccaaggccagatggcttacgagggccagcactggcatgcctcagaccgctgcttctgctgtagtcgctgtgggcgggccctgctgggccgcccattcctgccacgccgaggcctaatcttctgctctcgagcctgcagccttgggtccgagcccacagctccagggccgagccgccgcagctggagtgccggccctgtcacagccccacttgcagcctccacagcctctttctctgctgtgaagggggcatcagagaccaccaccaaaggcaccagcacagagttagcgccagctacaggccctgaggagccctcccgctttctgagaggggctccccaccgccactccatgccggaactggggctccgcagtgtccccgagccgcccccagagtcccccggccagcctaacctgcgcccagatgatagtgccttcggtcgtcagagcaccccacgcgtcagcttccgcgaccctctggtgtctgaaggaggcccgcgccggaccctgagtgcacccccggcccagcgccgcaggccacgcagtcccccacccagggcccccagccgtcgccgccaccatcatcataatcaccatcaccatcacaaccgccacccaagcagacgtcgccactatcaatgtgacgcgggatcagggtcagactcggaatcttgctccagctcgccctccagttccagttccgaatcatcagaggatgatggcttcttcctaggagagcgcatccctctgcccccgcatttgtgcaggcccatgcctgctcaggacactgcaatggagaccttcaactccccatctttatcgctccccagggactctcgcgcagggatgcctcgtcaggcccgagacaagaactgcatcgtggcttgaaggcaggccgtcctggagggggctccattctccagtcagagtagatgatgaggcccatgcccctcacccccacgccccgcccctacaacctaagtcataaatcctcttcctccctc

SEQ ID NO: 350 - DNA, 12602 bp, Homo sapiens
ggagggagcagtcggtcgctgcgccccggcgggccactttcccgggaccccgctcgtcttccttgggccgagattttccactgcgcccctccgagtacccgggttccaaacccctagccacgacatggaagaatttttgcaacgcgccaaatctaaactgaatcgaagcaaacgcttggagaaggtccatgtggttattgggcctaaatcgtgtgacttggattctctcatttctaccttcacatatgcttactttctagacaaggtcagtccaccaggggttctgtgtttaccagtgctgaacataccaagaactgaattcaactacttcaccgagacgaggtttattttagaagagctaaatatttccgaatcattccacatattccgggatgaaattaacctgcatcagctaaatgatgaagggaagttatcgataacacttgttggcagcagtgtgctggcgagtgaagacaaaactttagaatcagcagttgtcaaagtcattaatccggttgagcagagcgatgccaacgttgagttccgagagtcttcctcttctctcgtgctaaaggagattctccaagaggctcctgagctcatcaccgagcaactggctcatcgcctcagaggtagcattcttttcaagtggatgaccatggaatcagagaagatctcagagaagcaggaggaaattctttctatcctggaagaaaaatttcctaacttgcctccaagagaggacatcatcaacgtcctacaggagacccagttcagtgctcagggtttaagtattgaacagacaatgttgaaagatctaaaggagctgtcagatggagaaataaaagtggccattagtactgtgagcatgaaccttgagaattgtctatttcacagcaatattaccagtgacttgaaagcatttacagacaagtttggttttgatgtcctcatcctgttctccagctatctgtcagaggagcagcagccgagacgacagattgctgtgtactcagaaaacatggagctgtgcagtcagatttgctgtgagctggaagagtgtcagaacccttgcctagaactggagccctttgactgtggctgtgatgagatcctggtgtaccaacaagaggacccttcagtgacttgtgatcaggtggttctcgttgtcaaggaagtcatcaacaggaggtgtccagagatggtctccaatagccggacatcctcaacagaagccgtggcaggcagtgcccccctctcccaggggtcttctgggattatggaattgtatggttctgacatagagccacaacccagctctgtgaatttcatagagaaccctccagatctcaatgattctaaccaggctcaggtggatgccaatgtagaccttgttagcccagacagcggactggctaccattaggagcagccgctcatccaaggagagctctgttttcctcagtgacgacagccccgtgggagaaggtgctgggcctcaccacacccttctcccagggcttgactcctacagccccatccctgaaggggcggtggcggaggaacatgcatggtctggagaacacggtgagcacttcgacctcttcaattttgacccagcacccatggcttctgggcagtcccagcaatcttctcattctgcagactactccccagcagatgacttcttccccaacagtgacctgtcagaaggacagctccccgctgggcctgaaggacttgatggcatgggaaccaacatgtctaattattcatccagttcacttttgtcaggggctggcaaagatagccttgtggaacatgatgaggagtttgtccagagacaagacagtcccagagataactctgaaagaaatttgagcctgacagattttgtgggagatgaatccccttccccagaaaggctaaaaaatactggaaagaggatcccaccaacacccatgaatagtttagtagaaagctcgccatccactgaagaaccagcctcactctatacagaagatatgacccaaaaagcaactgacacaggtcacatggggccacctcagacccatgcacggtgcagcagctggtggggtggtttggaaattgactccaaaaatattgcagatgcgtggagttccagtgaacaggaatctgttttccagagccctgaatcatggaaagagcataagccaagctccattgataggagagcctcagattctgtatttcaaccaaagagcctcgaatttacaaagtcaggtccctgggagtctgaatttggtcagcctgaactgggtagcaatgatattcaagacaaaaatgaggaaagcttgccgttccagaacctgcccatggagaagtcacctttgccaaatacatctccccaaggaacaaaccacctgatagaagactttgcttctttgtggcattctggtcgctctcccacagccatgcccgagccctggggaaatcctacagatgatggtgaaccagcagctgtggcgccattcccagcctggagtgcatttggtaaagaagatcatgatgaagctttaaaaaatacctggaatttgcacccaacaagcagcaagacaccttctgttagggacccgaatgagtgggccatggcaaaaagtgggtttgccttttcttcttcagaactactggacaattcacccagtgagataaacaatgaagcagctccagaaatctggggcaagaaaaacaatgactccagggatcacatctttgcacctggaaatcccagttctgatctggatcacacatggactaattctaagccaccaaaagaagatcagaatggtttagtggatcctaaaactaggggcaaggtatatgaaaaggtagattcctggaacctttttgaggagaatatgaagaaaggagggtcagatgtcctagttccttgggaagattccttcttatcttacaaatgttctgattacagtgcatccaacctaggagaagattcggtgccttcccccttagataccaattattccacctcagactcttacacatcaccaacatttgctggagacgaaaaggaaactgaacacaagccatttgctaaagaggaaggttttgagtcaaaagatggtaactccacggcagaggagactgacattcctcctcagtcactgcaacagtcatctcgaaatcgaatcagttcaggtcctgggaacctagacatgtgggcttcacctcatacagataacagttctgaaataaataccactcacaacctggatgaaaatgaactcaagacagagcacacagatggtaagaatatctccatggaggatgacgtcggggaaagcagccagtccagttacgacgaccccagcatgatgcaactgtacaatgaaacaaaccgacaactcacacttttgcacagcagcaccaactcccggcagacggcccctgacagtctcgacttgtggaacagagtgattttggaggatactcagtccactgcaacgatctcagatatggacaatgatttggactgggatgactgcagtgggggtgcggcaatccccagtgatggtcaaacagaaggatacatggctgaaggttccgagccggaaacccgatttacagtgagacagctggaaccctggggcttggagtatcaggaagcaaatcaggtagattgggagctccctgcctctgatgagcataccaaggacagtgctcccagtgaacatcacacattgaatgagaaaagtgggcagctaattgcaaacagtatttgggattctgtcatgagagataaagacatgtcatcattcatgttaccaggctcctcacatatcacagattcagagcaaagggaattgcctcctgaaatccccagccattcagcaaatgttaaagacactcattccccagatgcgccagcagcctctggaaccagtgaatcagaggcacttatatctcatcttgacaagcaggacacagagagggaaaccctgcaaagtgatgcagcatccttggcgactaggcttgagaatccagggtattttccacacccagatccatggaaaggtcatggcgatggacaaagtgaaagtgagaaggaagcccagggagccactgacagggggcaccttgatgaagaggaggtgatcgcctctggtgtggagaatgcctcagggatttctgaaaaagggcagagtgaccaggaactgtcttctctggttgcatctgaacatcaggaaatctgcattaaatcaggcaaaatcagctctcttgctgtcactttcagtcctcaaaccgaggaaccagaggaagttttagagtatgaggaggggtcttacaatctagactcccgtgatgtgcaaacagggatgtccgcagataacctgcagccaaaagatacccatgaaaaacacctcatgagtcaaagaaattcaggtgaaactactgagacttcagatgggatgaatttcacaaaatatgtatctgtacctgaaaaggatcttgagaaaactgaagaatgtaactttctagagccagagaacgtgggtggagggccacctcacagagttccccgaagtcttgattttggggacgtccctatagacagtgatgtgcatgtcagcagcacatgttctgagataaccaaaaatcttgacgttaaggggtctgaaaatagccttccaggagccggttcgtctggaaattttgacagagatactatttctagtgagtatactcattcaagtgcatcaagtcctgagttaaatgactcttcagttgcactgtcctcctggggccagcaacccagttctgggtatcaagaagaaaaccaaggcaactggagtgaacagaatcaccaagaatctgaactaattaccactgatggccaagtagaaatagttaccaaagtgaaggatttagagaaaaacagaataaatgagtttgaaaagagctttgatcgcaaaactcctacatttttagagatctggaatgactcagttgatggtgattccttttcctctttatccagtcctgaaacaggcaaatattctgaacattcagggacacatcaggaaagcaatctaattgctagctaccaggagaaaaatgaacatgacatttctgcaactgtgcagccagaggatgccagggtcatttcaacaagctcaggttctgatgatgacagtgtcggtggtgaagagtcaatagaggaagagatccaggtggccaactgccacgttgctgaggatgaatccagagcttgggattcattgaatgaatctaataagttcttggtcacagctgatcctaagtctgaaaatatttatgactacctagacagctcagagccagcagagaatgagaataagtcaaacccattctgtgacaatcaacaaagcagccctgatccctggactttctcaccattaacggagactgaaatgcagattacagcagtggagaaggagaagagatcttctccagaaacagggacaacaggagatgttgcatggcaaatatctcccaaagcttcgttcccaaagaacgaagataattctcaactggaaatgctgggcttctcagctgatagcactgagtggtggaaggcctcaccccaggaagggagactaattgaaagtccatttgaaagggagctgtctgactccagtggtgtgttggagataaattcttcagtacaccaaaatgccagtccctggggagtaccagttcagggtgatattgagcccgtggaaacacactatactaatccttttagtgacaaccatcagtcaccctttctggaaggtaatgggaagaactcccatgagcaactctggaacattcaaccaaggcagccagacccagatgctgacaagttcagccagcttgtaaaattagaccaaattaaagaaaaggactcaagagagcaaacctttgtgtctgctgctggtgatgagctgactcctgaaacacctacccaagagcagtgtcaggacaccatgctgccagtctgtgatcatccggacacagcctttactcacgcagaggaaaatagttgtgttacatctaatgtttcaactaatgaaggtcaagaaacaaatcagtgggaacaagaaaaatcatacctaggtgagatgacaaattcaagcattgccacagaaaattttcctgctgtcagttctcccacccaactgataatgaagccaggctctgaatgggatggctctaccccaagtgaggactcccgaggtacctttgtgccagatattttacatggcaactttcaagagggtgggcagctggcctctgccgcgcctgacttgtggatagatgctaagaagcccttcagtttgaaagcagatggtgagaatcctgatatcctgacgcactgcgaacatgacagcaattctcaggcttccgacagccctgatatatgtcacgattctgaagcaaagcaagagactgagaagcacctcagtgcttgcatgggacctgaagtggaatccagtgagctttgtctcactgagccagagatagatgaagaacccatttatgagcctggacgggagtttgtcccatccaatgcagaactcgattctgaaaacgcaactgtgctgcctccaattggctatcaagcagacataaagggctcctctcagcccgcctctcataaaggttcacctgaaccttctgaaataaacggtgacaacagtacaggtttacaagtatcagaaaaaggagccagcccagatatggcaccaattttggaaccagttgacagaagaatcccaaggattgaaaatgtggcaactagcatttttgtaactcaccaagagccaactccagaaggtgacggttcttggatatcagacagcttttctcctgaaagtcagcctggtgcaagagctttgtttgatggtgatccacatttatccacagagaatcctgccttggttcctgatgctttgctagcctcagacacttgtctggatataagcgaagctgcctttgaccacagtttcagcgatgcctcaggtctcaacacatccacgggaacaatagatgacatgagtaaactgacattatccgaaggccatccggaaacgccagttgatggggacctagggaagcaagatatctgctcatctgaagcctcgtggggtgattttgaatatgatgtaatgggccagaatatcgatgaagatttactgagagagcctgaacacttcctgtatggtggtgaccctcctttggaggaagattctctgaagcagtcgctggcaccgtacacacctccctttgatttgtcttatctcacagaacctgcccagagtgctgaaacaatagaggaagctgggtctccagaggatgaatctctgggatgcagagcagcagagatagtgctttctgcacttcctgatcgaagaagtgagggaaaccaggctgagaccaaaaacagactgcctggatcccagctggctgtgctgcatattcgtgaagaccctgagtccgtttatttgccggtaggagcaggctccaacattttgtctccatcaaacgttgactgggaagtagaaacagataattctgatttaccagcaggtggagacataggaccaccaaatggtgccagcaaggaaatatcagaattggaagaagaaaaaacaattcctaccaaagagcctgagcagataaaatcagaatacaaggaagaaagatgtacagagaagaatgaagatcgtcatgcactacacatggattacatacttgtaaaccgtgaagaaaattcacactcaaagccagagacctgtgaagaaagagaaagcatagctgaattagaattgtatgtaggttccaaagaaacagggctgcagggaactcagttagcaagcttcccagacacatgtcagccagcctccttaaatgaaagaaaaggtctctctgcagagaaaatgtcttctaaaagcgatacgagatcatcttttgaaagccctgcacaagaccagagttggatgttcttgggccatagtgaggttggtgatccatcactggatgccagggactcagggcctgggtggtctggcaagactgtggagccgttctctgaactcggcttgggtgagggtccccagctgcagattctggaagaaatgaagcctctagaatctttggcactagaggaagcctctggtccagtcagccaatcacagaagagtaagagccgaggcagggctggcccggatgcagttacgttgcaggctgtcacccatgacaatgaatgggaaatgctttcaccacagcctgttcagaaaaacatgatccctgacacggaaatggaggaggagacagagttccttgagctcggaaccaggatatcaagaccaaatggactactgtcagaggatgtaggaatggacatcccctttgaagagggcgtgctgagtcccagtgctgcagacatgaggcctgaacctcctaattctctggatcttaatgacactcatcctcggagaatcaagctcacagccccaaatatcaatctttctctggaccaaagtgaaggatctattctctctgatgataacttggacagtccagatgaaattgacatcaatgtggatgaacttgatacccccgatgaagcagattcttttgagtacactggccatgatcccacagccaacaaagattctggccaagagtcagagtctattccagaatatacggccgaagaggaacgggaggacaaccggctttggaggacagtggtcattggagaacaagagcagcgcattgacatgaaggtcatcgagccctacaggagagtcatttctcacggaggatactatggggacggtctaaatgccatcattgtgtttgccgcctgttttctgccagacagcagtcgggcggattaccactatgtcatggaaaatcttttcctatatgtaataagtactttagagttgatggtagctgaagactatatgattgtgtacttgaatggtgcaaccccaagaaggaggatgccagggctaggctggatgaagaaatgctaccagatgattgacagacggttgaggaagaatttgaaatcattcatcattgttcatccatcttggttcatcagaacaatccttgctgtgacacgaccttttataagttcaaaattcagcagtaaaattaaatatgtcaatagcttatcagaactcagtgggctgatcccaatggattgcatccacattccagagagcatcatcaaactggatgaagaactgagggaagcatcagaggcagctaaaactagctgcctttacaatgatccagaaatgtcttctatggagaaggatattgacttgaagctgaaagaaaagccttagttggccatgctggaagaagaggatgcttttctggttcatggttctgttgaaacatatctacctgaaagagacagggctgatgttacctttttccactttgcactacctggtgccattctaaatttctaaggggaaaaatagaaagtttgtttactcttaagatattttatgaaattgtgtgtactttcctattttgccaattatgtgcctcaaagattttagttgagccttagcaagaaagtaggaccttccatttcaatacttcattaacacggtgtagtgatactttgtcccttagactggtgtttaccagtaagatacctttaatccactgttaagtatgagtggatttgtttccatagattagctggatttccttttggtgattgcattaggtttaaagtacacaggtctcaactctccccaggaaagtttcccctgtttgactccacctttaaaatcctaagcctgactaggacagccacaaaccacacaaggtgtaaaaccatcatcagctaagtgcccgttttgttcttgtttaccagaatctcctttaacttctcaaagggaagccgggctttctaatccacgtcaactttattttagttgtcaaattgggcattatattttatgtaaattggtcttttaacatcattttcctgatgaatgttggtgaccaccacattgtgaaatttaagaatccgtgttgcatgtttggtagctctctgagtttcaggccataaactcagctccagaggttaccttttaagtgccaagaactcaagtgcaaggtggcctactcaaaaatcatttggtagcattcagttattcatgaattcctctctcgcatgcattataaaaagtgatctgctttaaaacaccgtaatctgatcataggcttaaaattaaatatgagtattactttcatgtacaaaatatttcctttatagtcttcatatgccctttaaaatgccaacaagatttcaagtctgtaggcctctagtgaggtggggtggcaaaccacagctaagtctcgctcaccactgcaagctaagaatggtttttacattttgggttggaaaaattttttttgaatatttcatgacacatgaaaattattcaaatgttagtgccgataaataaagtggtactgaaacacagccacacaaacttgtttttgtactgtctacagctactttcacactacagccgcagagctgagcagttcagcagaccgtatgtcccacaatgcctaaaacattgactatgtttacagaaaaagtttgctgacccctgctctagcaaacgcatcctttcctactccaccccaatttgtatttagatagtttctctaacagaacggacaaatgaggctgcaaactaatttatttttgtcaaaaatcaatgttttgacatccacagacagtgaaataaaagaaatggcttgctgaaaaacatgaggagtcctagccacaaaatcactgcttaggttgcaattgccaaaatgaagccttcttagaagcacttctttagtatatacaggtgttggctgaagtccgtgcctcactctgggaaccattcttagtctccagtgtctcctattacaaagaagctggcagaaataaaaatgaaggggtgagagcggttccaccctagtctcatggtggaaaattcattggggagagctgtccaggatatttggagtcctgggtagaaggagcttgtaactactttaaagtcgacatctttgcacaggtgattgagtttctctgacctcattgcttcacctctgtctcctcccgtccttccgcacgtgcccacacacacgcagttcagccctctttcctccataagcctccatcgttttctcttttctcctcttgatcctttcaagcgagtatcttgttgaattgtatgttctgttggatctcctccttcataacatctggcttgttggacagaaaaaccctacagcccaccccctcccacagcccacctccacttttgaaagcccaaattacacctctcccagaacacagtgttgacgtaaatacagttacccaatattcctgtttgttcacctatttgctactttcactcagtagcatcccattttgtaaaatgaattccatggtcaccctgtcacaggaagtaatgaaaaatccagtgttcagtgtagtggtgcaaacctgagggcatagagctgttcatagagggctcttgttatagccaaacagacacagcaacaatctcaccatttatatatatatttttaacttgtccagctcatctatggaaaactactcaggtggtatgctgtttgaagcctcatcttcctacatgaaaattatgggcatttgtcccaatgattttgtttcagctgttctgtaggctgcataaccactctgatatttaggtatctgctattttattatcttaaaagacaaattaatttaattgcatgtgctagggaaaagctaccatgtacattcaccccaagtaaatagaatcctagatgaatcctagaaaaataatccctaagcagataggtagacagaggtaaacattcacatgatttagctctctagctcttgcactctgaacattcttgctttggttctgacttctgggaactgctttgcatttctcctatagatctgtagttaagggaaccaaggggtcattggggcaaaagcattgtttctcaaagctccttgattaagagaaagaacagaaatttgcacagaagatagtgtcaaggagtgagaaagtttgtttgagggcagtagctcagtgtggaagaaaatcctgaagtttctgttgaagccatacaatgttctatggggttactctctaagacattctctgaggtgtgtgaggaagtcactactcctagcctttgttaagatgtaattttaaatattcagttatggtactatgtttgcaactctcgtcttatcacaatgcctcagtagtttgttcccttagaaacatttagatgtgcacaaattaatcttttatatatctaaaggtttttctatcatgcattggattgctcagaataaagtgtctgttagacttcgttttggtaaataaattctccataatgtagattaataatataaaagtctttaatgacacaatatatctatatagcctcactgtataattcagaaataaaaattgattctgcaaaaaaaaaaaaaaaaaa

SEQ ID NO: 351 - DNA, 2420 bp, Homo sapiens
caggtacgcatgccccagaggcgcggcgcttggcgggaagctgagtcctggccttgcgtcgcactgtctgtcctcagctcgcgtagccgcgctcgcgactccctttcccggcatgccaggcggtgcggccgccctctgggccgtgtaaaggcccctcggtctaaggcttccctatttcctggttcgccggcggccattttgggtggaagcgatagctgagtggcggcggctgctgattgtgttctaggggacggagtaggggaagacgtttgctctcccggaacagcctatctcattcctttctttcgattacccgtggcgcggagagtcagggcggcggctgcggcagcaagggcggcggtggcggcggcggcagctgcagtgacatgtccagcatgaatcccgaatatgattatttattcaagttacttctgattggcgactcaggggttggaaagtcttgccttcttcttaggtttgcagatgatacatatacagaaagctacatcagcacaattggtgtggatttcaaaataagaactatagagttagacgggaaaacaatcaagcttcaaatagaatttgctgattcccttggaattccgtttttggaaaccagtgctaagaatgcaacgaatgtagaacagtctttcatgacgatggcagctgagattaaaaagcgaatgggtcccggagcaacagctggtggtgctgagaagtccaatgttaaaattcagagcactccagtcaagcagtcaggtggaggttgctgctaaaatttgcctccatccttttctcacagcaatgaatttgcaatctgaacccaagtgaaaaaacaaaattgcctgaattgtactgtatgtagctgcactacaacagattcttaccgtctccacaaaggtcagagattgtaaatggtcaatactgactttttttttattcccttgactcaagacagctaacttcattttcagaactgttttaaacctttgtgtgctggtttataaaataatgtgtgtaatccttgttgctttcctgataccagactgtttcccgtggttggttagaatatattttgttttgatgtttatattggcatgtttagatgtcaggtttagtcttctgaagatgaagttcagccattttgtatcaaacagcacaagcagtgtctgtcactttccatgcataaagtttagtgagatgttatatgtaagatctgatttgctagttcttccttgtagagttataaatggaaagattacactatctgattaatagtttcttcatactctgcatataatttgtggctgcagaatattgtaatttgttgcacactatgtaacaaaacaactgaagatatgtttaataaatattgtacttattggaagtaatatcaaactgtatggtgataagtattgttttgattcttatggttaaagggaaatagagccttgcattatattcaacacagccatttgtgtgtgcacaatgcaaactaaggtattctagacctatcttagagcagcatccagtatttgctttctagataatatgcccaataacatgacctagaggggcttctgtgctgtgtagggatttaaccaacttcagtggttcagggagctcaaactatatgtaaaacaagtttagaatgtatgctatctagcccgttatctctgatccttctctaaaaccatttgaaatagcttcattgatcaacatttcataaatgcatctgtggtagaggtagaaagcagcacctttcctaattggcaaatgatcagactaatgtgtgctaatgtttttcttccatgctttcagtcagattcaactattttatcctccacagttgcttaacttggtgttggaggagggtttaagcattaagataggaagcaggaaatttgattgctctaaatttagaaattatatccctaaaaattaaaacatgaatactgggtggtaatgataattgaggcaaatgtatttattttggtgacattttgcatatatgaagattttctgaaataggaccttcaagatcctagggggttttgtttggtttttaattgtgaggaataaaaaatcttctgcccacactggcattttaaggtgactgaggtcaaacgttgtttccttaggttgaaatagcagccaaaacattcttcacgcaggggcttgggatatggctgctggcaacacattttgttgtgggctccttaatttaatgataaaatttaagctaaacacaagccaaaaatgaataggtttttttaatttttatttttcactaaacaggcaattgaaatacatggtacaaaaataagtggtaagataattgtaaaatgaaatggacagaatattcaattttccatctatgaaaatttcacaataaaaatcatagtttactttgtaaaaaa

SEQ ID NO: 352 - DNA, 4450 bp, Homo sapiens
gccgcctcctgggaagatggcgctgcacttccagagtttggctgaattggaagtgttatgtactcatctctacatagggactgatcttacacaaagaatagaggctgagaaagcactcttggaacttattgacagtccagaatgtctcagcaagtgtcaacttttattagaacaaggaacaacatcctatgctcagctccttgcagcaacatgtctttcaaaacttgtcagccgagtcagtcctttacctgttgagcagaggatggacatcagaaactacattctgaattacgtggcatcacagcccaagctggctccctttgtcatccaagctcttattcaagtcattgctaaaatcactaagttggggtggtttgaggttcagaaagaccaatttgtcttcagagaaattattgctgatgtgaagaagtttctccagggtactgtggaacactgcataataggagtaataatcctttctgaattgactcaggaaatgaacctggttgattattctagaccttcagcaaaacacaggaaaatagctacctcatttcgtgatacttctctcaaagacgttttagtgctagcatgctctcttttaaaagaggtgtttgccaaacctttaaatcttcaggatcaatgtcagcaaaatctggtaatgcaggtcttgaaactggtccttaactgccttaactttgacttcattggcagttcagcagatgaatctgcagatgatctttgcacggtgcagattccaacaacttggagaacaattttcctggaaccagaaacattggatcttttcttcaatttgtatcattcacttccaccactactatctcagttagcactttcatgtttagttcagtttgcttcgacaagaaggtccttatttaacagtcctgaacgtgccaagtaccttggtaatttaattaagggagtaaaaaggatacttgaaaaccctcagggtttgtctgatccaggtaattatcatgaattttgtcgatttttggctcgtttaaagacaaattatcagctgggagaattagttatggtgaaggaatatcctgaagttattagattgattgctaattttaccattactagcctacagcactgggaatttgctcctaacagtgttcattatttattaactctgtggcaaaggatggtagcatctgttccttttgtgaaatcaactgaaccccacctattagacacttatgcaccagaaatcacgaaggcctttatcacttctcggttggactctgttgccatagttgtgagagatcacttagatgatccactggatgatactgccactgtgtttcagcagttggagcagttgtgcacggtcagcagatgtgaatatgaaaagacatgtgctcttcttgtgcagttattcgaccaaaatgcacagaattaccaaaaacttctgcatccatattctggtgtaactgtggacatcaccattcaggaaggacgtcttgcatggctggtatacttagttgggacagttgtaggaggaagattaacatataccagtacagatgagcatgatgctatggatggagaattatcctgtcgagtttttcagcttatatctttaatggataccggattgcctcgatgttgtaatgagaaaatagagcttgcaattctgtggttcttggatcagtttcgtaaaacatatgttggtgatcaacttcaaagaacctcaaaggtatatgctcgtatgtcagaagtcttaggaataacagatgacaaccacgttctagagacgttcatgacaaaaattgttacaaaccttaaatactggggaagatatgagcctgtaatttcaaggactcttcagttcctaaatgacctttctgttggttatatccttttaaaaaaacttgtgaagatagatgctgtgaaattcatgctaaaaaaccacacgagtgaacacttcccttttcttggcatcagtgacaatcatagtctcagcgacttcaggtgtcgaacaaccttctacacagcgctcactcgccttctgatggtagatctgggtgaagatgaggatgaatttgagaatttcatgctgcctcttacagttgcttttgaaacagtattacaaatattcaacaacaactttaaacaagaagatgtaaagcgtatgttgatcgggctggcaagagatcttcgagggattgcctttgcactgaacacaaagaccagctacaccatgctgtttgactggatgtacccaacgtaccttccccttcttcagaatgctgttgaacggtggtatggagagccaacatgtacaactcccatcttgaaacttatggcagaacttatgcaaaacagatcccagcgtttgaattttgatgtatcatctcctaatggaattcttctcttcagagaagctagtaaaatggtttgcacttatggtaatcagatcctgtcccttgggagcctctcaaaagatcagatttatccaatgaaactcaagggcatctccatctgctattcagctctcaagtctgccttgtgtggaaattatgtcagctttggcgtcttcaagttgtatggggacaaccattttgacaatgtactccaggcttttgtcaaaatgctgctgtcagtgtcccacagtgacttgctacaataccggaaactgagccagtcttattatccactcctggaatgtctcactcaggaccatatgagcttcatcatcaacttagagcctcctgtactcatgtatgttctcacatctatctcagagggactcactactcttgatacagttgtctcctccagctgctgtaccagtttagactacatcgtcacctacctcttcaagcacatagcaaaagagggcaagaagccacttcgatgcagagaggctacccaggctggtcagagactattacattttatgcagcaaaacccagatgtcctgcagcagatgatgtctgtcctcatgaacaccattgtctttgaagactgtcggaaccagtggtcagtatccaggcctctcctggggctcatcctgctcaatgagaagtatttcagtgaactgagagcaagtttgataaacagccagcccctccccaagcaggaggtccttgcccagtgcttcagaaacctaatggaaggagtggagcagaacctgtccgtcaagaacagagacaggttcacccaaaatctgtctgtattcagaagagatgtggcagaggcgttgcgcagtgatggcaacactgaaccatgcagtctcgacatgatgagctgacccgacttttctgaccatgtgcggagcagcctttatcaagagactcctgaaggtctgggtctcaggacagtgatgttggctagcccaggggaatgtatttttcaaaacatacaagcaacagcaaaagccctaacttcttatacgtctagcctaattataagaatttctaacagtaccagtgtaaattcagtcttttctctgaaaagcaaaggatgtgttttcagtctttctatcaaatattatctttgttctcctaatgctctgaaaggatgtagaaacaatatttaaccaaagaacgtaataaaccaggtttgcacctaagtgtgtactagtttatggttctgcagtcaaggttgtcaatttgttggagatgcagccttcaccatggatcctggattgagacgaatgccattggaacctgttaaatgagtagtttgttatgtgtctggaagaagcagcgttagggactttgggctgtgagcatttagaacgagcctggaagcactacagagcatcccacaggaccacacgcaggcctccctgcctcagctgcatctgataaagttgagagacagtaacacaattaaatgacttagaaacaatgtttgcttttcactggcataaatctgaagtggttcagtctagaagaattaagctgtgcaattactgcctgcagagatatttcttcaggaggagtcatgtagccccagtcagaagttctgggtggtgccagcacccagtcctctgcctccatttaatttttaagagaaggtgaaggtaactattagaatataatatttgaagcagctctgccttcttagggctacccaaaacagttctaggtgctaaaattcagattttcagaggatgagaaatagctggtttccaactctccacaaaaactcttattactgttgggacttgggattctgacttaccccaaacccagaacatgaagaagacctttacagtttgtgctctactgttactaggctattaatttgagatcgtccactgtcaagtgttttactatctcactgctgtttttatgattcaggcttataacaaatattgtatcctttatttctgataagacatgaaaggttggccttactgttgaacaataagtaaatccacaggctcctgttgtaatctcaaaaaaaaaaa

SEQ ID NO: 353 - DNA, 1878 bp, Homo sapiens
gccaagggaaactgccgcgaggaggcggaaggagcagaggaccggcagccggcgtcgaggcggggcgcgggaacgacggcggccatggcggcctcggggcccgggtgtcgcagctggtgcttgtgtcccgaggtgccatccgccaccttcttcactgcgctgctctcgctgctggtttccgggcctcgcctgttcctgctgcagcagcccctggcgccctcgggcctcacgctgaagtccgaggcccttcgcaactggcaagccactatggaaggaggggtcaggattacagcagaggagactggcacacagagtgttaagtgacacccactcaatccaccccgaagctgttacacttaattaaccctcaaactgcccagtgagtttacaggctggtaacctacatctttgtctacgagaatcccatctccctgctctgcggcgctatcatcatctggcgctttgctggcaatttcgagagaaccgtgggcaccgtccgccactgcttcttcaccgtgatcttcgccatcttctccgctatcatcttcctgtcattcgaggctgtgtcatcactgtcaaagctgggggaagtggaggatgccagaggtttcaccccagtggcctttgccatgctgggagtcaccaccgtccgttctcggatgaggcgggccctggtgtttggcatggttgtgccctcagtcctggttccgtggctcctgctgggtgcctcgtggctcattccccagacctctttcctcagtaatgtctgcgggctgtccatcgggctggcctatggcctcacctactgctattccatcgacctctcagagcgagtggcactgaagctcgatcagaccttccccttcagcctgatgaggaggatatccgtgttcaagtacgtctcagggtcttcagccgagaggagggcagcccagagccggaaactgaacccggtgcctggctcctaccccacacagagctgccaccctcacctgtccccaagccaccctgtgtcccagacgcagcacgccagtggtcagaagctggcctcctggccctcctgcacccccgggcacatgcccaccttgcctccgtaccagcctgcctccggcctgtgctatgtgcagaaccactttggtccaaaccccacctcctccagtgtctacccagcttctgcgggcacctccctgggcatccagccccccacgcctgtgaacagccctggcacggtgtattctggggccttgggcacaccaggggctgcaggctccaaggagtcctccagggtccccatgccctgagagaatttctagggaagtcatctcacttggccttctgaaggtcctccctaagagtctcctgacaaaagttacttattgaacacctctatgtgccaggctctgtgttgggtactttgatcaatgcccctgtttcagtctcatctgtactcacggcagccctgtggagtacggtgtactggcccagcttacagatgcagaaagcgagacgttctgccatcagataaagtcacgtggctctttagtaacacggacaaggctcctcgccaaggaactcgtggcagaagagggcagcagttggcagtagctgccgatgtctgtccccagctccaccattcctccctgtggctgtgccgtgctcgtggtttcagtgtccgtgtgtccatgtgtctgcccttcaggagctcgcagctggtgtgcttggcggtcccaggcctgtgtagtgtctctcccctgctgcgggcgcccccaccccgattcctctccccagaagcggtgggatgggcccccatgaactgcagcagcatgctgaggtgtccatgttgtctgcctttgtataaagaaacagcctctgacctgc

SEQ ID NO: 354 - DNA, 2099 bp, Homo sapiens
tttcatttgtgattcggatgatgcagctctaggtggattgactatgaaaggcgctgaatatcttcaggaaaatgggttccatgagaagtgacatcctcctcgaatcaaaagattctcaggatgatggagtgagtgatggaataggttgccaactgtagttactccactcagcacagaatggctgcggggaaatataatcagacatgcccaaagaagtctgcttagggtgaaacaaatacctttgaggtttaaatcaggaaggagagactgtttctacaggtgtcatacaaaaatcaatactgagccaaggattattggatcccatagaaccacggagacttggtagtgaaattcttccaaagcattccatccgtgcaggcagatggtgttcctaggtttggaaatataaatcccatgggaagtcagctgaagaccattttatgcatcactcatcctgttagagccctgtgctgttctgtctctctataagactggctgaaaccaccacggttgtttacaatttatgctctaactttggatcacctagttaatactctaactccgattattaccaaagacaatgttctataaaagatattgtctattagaaggatgcttctgcattattaataaaatcacagggaaaatgcaacattttggatgtcacatctgataagttggcagttaaagaacagaaacagcaataagactgcgtggccacattttcccagtgccaccaactgggatttaagctgactaacattttgaaagcccagcccatttcattcacagcaggatggcagtgggtgactgatcgtacccgccagctggctaatgtcataattaacaaagttgctactacatctgcaaagtttaatcgaaaaatttgccagtgatatgatggccttgtcacagagatcacaagggacacggagttgacttttgctcaaggtggaacgacagagctgtgtaggcaagatgagaaattgcgaacttgttcggccaaaggattatctcctgagatgtgtagaaatgaactcttgtcagagtttcaaaggaattaacgttttttggtaaaatgtgctaatgtaaagagtgagaagattagtgatacataatgaaagcaatgcattctttcacatggaaatgggaatataataaatgtcctgcaggtgattggggctgtagcaattttattgaagattaaagtttgattgacctttgttagggtgattaacccttctgaaattaaaagccagagctgaattattctgctcaatttaaatgcaaacatcgagcaggtcgtatgtcattcaaataataataagaagaaaatcttcctattttaattttcatttttgcacttctgagtggtatgctgctttagaaggaccatagctctcgcaaaagcattctggtggcagagaatatacaataacgttacagataattgggagcatataggaagagtcccaagcactactgcctgcattcgaaacatcaaaaccaccatcccaacaaaagcacggagcatgaagccaatctctgtacactgaaaatgcatgctcccaatagaaaaacaacctagggatgtcctgaaggggttaggaataaataacaatgacatctctattctagttcagtgccaaccaccgaaattgcatatcatatccatgttaaatctacatgatgtctcctggaaatgcgtgctttttggtacagttgcttatgaagcagtttctaaaagttgattatttctgatgtctggaatttcattctccatgatctctggcagtttctgaatatattcagtattttcattaagttcaaaaatgctgtaggagaagctaacgaattatttgcaatgccatttaatggtttagttttatttttctctgttaaattttctaagccttggtgaaaagttgtgtattcacatttcttcaaaaaactgtttccatttttcatatcatgttaattttgtttagttctaagtcagtgaatatttttagtcttaggtcccaccacatagtgaatgtgtctgccttttatgtatctgtgaactattaaaatgataataaaggttctcttccttccat

SEQ ID NO: 355 - DNA, 3101 bp, Homo sapiens
atgctcgaggtgtccggtgaccgaaacactcttagctgggtgcagggtgcggctcagggcgtggtcaccgggggctacttagggccgccggtgcgggggacgacgcaaaggttaactgcgagctgccgggcactcagcgcgggtcatggcgtggatactggactgccttttcgcctcggcctttgagccccgcccccgccgtgcaaaaacaaccagaggctgctctgcttgagggtgaagccgcctcccagttttccctccccctctacccccacccccatagttctctccaccaggtccagtgacaattggatgatgcagccttgataatcatccgattccagaatgggtggctgcattccttttctgaaggcagcaagggcactgtgccccagaatcatgccccctttgctgttgttgtccgccttcatttttttagtgagtgtcttgggaggagccccaggacacaaccccgaccgcaggacgaagatggtatcgatacacagcctctctgagctggagcgtctgaagctgcaagagactgcttaccacgaactcgtggccagacatttcctctccgaattcaaacctgacagagctctgcctattgaccgtccgaacaccttggataagtggtttctgattttgagaggacagcagagggctgtatcacacaagacatttggcattagcctggaagaggtcctggtgaacgagtttacccgccgcaagcatcttgaactgacagccacgatgcaggttgaagaagccaccggtcaggctgcgggccgtcgtcggggaaacgtggtgcgaagggtgtttggccgcatccggcgctttttcagtcgcaggcggaatgagcccaccttgccccgggagttcactcgccgtgggcgtcgaggtgcagtgtctgtggatagtctggctgagctggaagacggagccctgctgctgcagaccctgcagctttcaaaaatttcctttccaattggccaacgacttctgggatccaaaaggaagatgagtctcaatccgattgcgaaacaaatcccccaggttgttgaggcttgctgccaattcattgaaaaacatggcttaagcgcagtggggatttttacccttgaatactccgtgcagcgagtgcgtcagctccgtgaagaatttgatcaaggtctggatgtagtgctggatgacaatcagaatgtgcatgatgtggctgcactcctcaaggagtttttccgtgacatgaaggattctctgctgccagatgatctgtacatgtcattcctcctgacagcaactttaaagccccaggatcagctttctgccctgcagttgctggtctacctgatgccaccctgccacagtgataccctggagcgtctgctgaaggccctgcataaaatcactgagaactgcgaggactcaattggcattgatggacagttggtcccaggcaaccgtatgacttccactaacttggccttggtgtttggatctgctctcctgaaaaaaggaaagtttggcaagagagagtccaggaaaacaaagctggggattgatcactatgttgcttctgtcaatgtggtccgtgccatgattgataactgggatgtcctcttccaggtgcctccccatattcagaggcaggttgctaagcgcgtgtggaagtccagcccggaagcacttgattttatcagacgcaggaacttgaggaagatccagagtgcacgcataaagatggaagaggatgcactactttctgatccagtggaaacctctgctgaagcccgggctgctgtccttgctcaaagcaagccttctgatgaaggttcctctgaggagccagctgtgccttccggcactgcccgttcccatgacgatgaggaaggagcgggtaaccctcccattccggagcaagaccgcccattgctccgtgtgccccgggagaaggaggccaaaactggcgtcagctacttctttccttagatgtttttccttctataaggtgccagacaggggaaaagggtgggggtacatctgggatgtcacaggaaacattaaggagagagttgaaggtaaagatctgaaggtaagaaggagttccacctgatgctcgggtcaggatgagaattccaaacacactgccagccccttcactggggatgcttggtctcttctgctggtaaaagcagagatgtttctgtgtcatgcccaagctccccggtgctaccttgcctttctcttttacccctgatcttggctttctctctctctctgcagactttcctttaattgatgtgacatttgtggtaaacacctttcccagggaacctcacaaatcttgagatgctttcccttccccagatgggattgcatgatttccctgactttcctaccctcctccagagagctcagttggaaaggccctcaagaggcatgctagaacgttaggtcagcctactgacagctgacaaacaattaatgcgaaatcatgtcacaccaacccatagccgtgtccacgcagcaactccaccaccttaggatttccccctccaaattattcagaccaatggcttgccaaatggcctctcccaaaattctgtacagttttgctcaggtcacgccaacagggaaacctcaagtgtaggtctaattagtgtttctgggatccaaagttagaggaaaatttagattttattgcctggatctgctttaaagacaattggtgtttacaccctcttgtcagcaaaacagctagttaggtaaggacatatagttccaagtaggtaaagtcacttgattacaaatgttcttaactatcgtctctgtaattcctttatacaggacagtacaaaattgtgggacatgctctggtaacacacagatatgggttgcatatgatccagaattacagctgatattatggatgacaactgctaaggtccataaaatgaagactgtattgtattgagggatagaaattgatcatttaatgggtaacaactgctgagctcaaagatttgtgattgttaaaacttctctggcatttaatcattaataaacatctgtattgtgacagcagcaaaaaaaaaaaaaaa

SEQ ID NO: 356 - DNA, 719 bp, Homo sapiens
agtctcttttccggttagcgcggcgtgagaagccatgagcagcaaagtctctcgcgacaccctgtacgaggcggtgcgggaagtcctgcacgggaaccagcgcaagcgccgcaagttcctggagacggtggagttgcagatcagcttgaagaactatgatccccagaaggacaagcgcttctcgggcaccgtcaggcttaagtccactccccgccctaagttctctgtgtgtgtcctgggggaccagcagcactgtgacgaggctaaggccgtggatatcccccacatggacatcgaggcgctgaaaaaactcaacaagaataaaaaactggtcaagaagctggccaagaagtatgatgcgtttttggcctcagagtctctgatcaagcagattccacgaatcctcggcccaggtttaaataaggcaggaaagttcccttccctgctcacacacaacgaaaacatggtggccaaagtggatgaggtgaagtccacaatcaagttccaaatgaagaaggtgttatgtctggctgtagctgttggtcacgtgaagatgacagacgatgagcttgtgtataacattcacctggctgtcaacttcttggtgtcattgctcaagaaaaactggcagaatgtccgggccttatatatcaagagcaccatgggcaagccccagcgcctatattaaggcacatttgaataaattctattaccagttc

SEQ ID NO: 357 - DNA, 2820 bp, Homo sapiens
aggcatcggcgcggtcagcctcgtggcgcgcccacgcccccacgccggctcttcccggggtccttccgtgcgcgttgatatgattggccggcgaatcgtggttctcttttcctccttggctgtctgaagatagatcgccatcatgaacgacaccgtaactatccgcactagaaagttcatgaccaaccgactacttcagaggaaacaaatggtcattgatgtccttcaccccgggaaggcgacagtgcctaagacagaaattcgggaaaaactagccaaaatgtacaagaccacaccggatgtcatctttgtatttggattcagaactcattttggtggtggcaagacaactggctttggcatgatttatgattccctggattatgcaaagaaaaatgaacccaaacatagacttgcaagacatggcctgtatgagaagaaaaagacctcaagaaagcaacgaaaggaacgcaagaacagaatgaagaaagtcagggggactgcaaaggccaatgttggtgctggcaaaaagatgagggaattggggcttggagtgcaagcattgggaagaatttcccaggaagagagatgcacagatgtgaagaactcgaaggcaagagaaagccggggggttgtgtggcaggtagaagtgccaggaccgtggagcgtgtggacatgtggcagattgcggaggggctgtggcaagtatttacaggtggccgttacctggaggaagactgaaaacagagaacagtgctgccaggcgtgccttttggagagggcactggtcagaaacggagccttcatgtcgcctgcctcacctgctcctgctggttctccccaccctgtggacggtgacttggtcctccacttgccagaagccttgtcagcaaccttgactctgtcaccccacatccaggccatcaacaagtcttttggccctttctttgaaatccaccaggaatccagctgcttctccccaccttcctgcctctctggtctgggccactaatgtcactgccatggccgccttgctgcatttctgaggatgcttcatctctccaccttcttctccactcagcagccagcagggcactgtggaaatcggagtcacatgagctggcacctctgttcagaaccctccagggctccacatctctctcacccaaatgccaaagacctccccacgcccccacaatcccccacgacctggccactggcctcccaccaccttccagctccagcggctcctaccacatttaaggctttccttcctagttttaatttttcctcgtcagcagttgattttattattttcttgtttattggtattttcccactagaaatgaagctgcgtgaagttagagatttttttttttggtctgtgttcctaattagctcattgctatacccctggcgcccagaacaatgccttggacacagtacgcagtagactaaataaatacttgttgaatgactgactgacggaatgacggctgtgtggggagtggattgggtcgtgaggcagaggctgcggtggaaactcaggcaggaggtgatggtggttcttggggctgcggaatgccaagtttagaagctcttcctctgctgtggcacatgaaccggtcactcgagaaggcttttagatttactttgcctaatcccctcttagtgcatgtggggaaactgaggtacacaaaaggaattccccaccaagttaggggcagaacctagcccccttgtctcccagatggatatcttcttttttttttgagacggagtcttgctctgttgcccaggctggagtgcagtggtaccatcttggctcactgcaacctctgcttcccaggttcaagcgattctcctgcctcagcctcctgagtgtctgcgattacaggtgcacacaaccacgcctggctaatttttgtatttttagtagagacggggtttcaccgtgttggtcagggtgacctcaaactcctgacctcatgatccacccagctcagcctcccaacgtgctgggattacaggcatgagccaccgtgcctggctggacatcttgttattaaagcttcttctctctttgtaggggagggggagatgcctctggtggagaagaccagtgtggcagtgactgtgtctgttagtgaacctggtggctggttgagggtctgtcgtggtgactgaggacacatacaaagtgcttttctcagtggtcaccttggtgttggtgaataagggtcagaagatggctcctgtcctagggcactgccagtcggtttggaagctgaaatgcctgcttagcagtttgaggaaacacagaccttggaggatcttctggttgcctcttcaagaattcattctattccccttctgctccccaaatttgcttttcttggggtgggtcttggttggcctaagccaagaaagtatggcatctactccttccatagcaatagctcaggaataggcagtgacccagacctgaaccaatcagtgcatggaattacccctggccaaagtggttgattgaggctgggtgcaagcagagttgtgagaaggctcccatttggtggttggagagatcgcacttgctccagaggtcataatgtgcagatctgaggcttggaactgctgcagacattttgctaccacaagtgaagccaccctgacgacacagttgacaatttggagcagggcagagctgagagaacagcagggaaacagccagagtcttgctcaagcctccctgaagtatctatacccctggactctagttatgggggctaataaatgttatatactgtttaaggtaaaaaa

SEQ ID NO: 358 - DNA, 1244 bp, Homo sapiens
gcggagctaagatgcggaggagggtgacgcactagctctccagttcgcccgttcctggcctgacccccaccaaggcccataccgcagtaggctcctcgggctgcccctcggttgacaatggtctccaggatggtctctaccatgctatctggcctactgttttggctggcatctggatggactccagcatttgcttacagcccccggacccctgaccgggtctcagaagcagatatccagaggctgcttcatggtgttatggagcaattgggcattgccaggccccgagtggaatatccagctcaccaggccatgaatcttgtgggcccccagagcattgaaggtggagctcatgaaggacttcagcatttgggtccttttggcaacatccccaacatcgtggcagagttgactggagacaacattcctaaggactttagtgaggatcaggggtacccagaccctccaaatccctgtcctgttggaaaaacagcagatgatggatgtctagaaaacacccctgacactgcagagttcagtcgagagttccagttgcaccagcatctctttgatccggaacatgactatccaggcttgggcaagtggaacaagaaactcctttacgagaagatgaagggaggagagagacgaaagcggaggagtgtcaatccatatctacaaggacagagactggataatgttgttgcaaagaagtctgtcccccatttttcagatgaggataaggatccagagtaaagagaagatgctagacgaaaacccacattacctgttaggcctcagcatggcttatgtgcacgtgtaaatggagtccctgtgaatgacagcatgtttcttacatagataattatggatacaaagcagctgtatgtagatagtgtattgtcttcacaccgatgattctgctttttgctaaattagaataagagcttttttgtttcttgggtttttaaaatgtgaatctgcaatgatcataaaaattaaaatgtgaatgtcaacaataaaaagcaagactatgaaaggctcagatttcttgcagtttaaaatggtgtctgaggttgtactattttggccaagtctgtagaaagctgtcatttgattttgattatgtagttcatccagcccttgggcattgttatacaccagtaaagaaggctgtactcaagaggaggagctgacacatttcacttggctgcgtcttaataaacatgaatgcaagcattggc

SEQ ID NO: 359 - DNA, 1515 bp, Homo sapiens
ccggctccggcgctcacctacccccggcaggccccgcccccgtgcggtccctcccggaagcgccggcggagcgtcctcgcatggagcgcgagcccagcgcctcggaggccgcccccgcggcggccgcgctcttcgcctggggtgcaaatagctatgggcaacttggcctcggccataaggaagatgtgctgttgccccagcaactgaatgacttctgtaaacccaggagtgtcaggaggatcacaggaggagggggccactctgcagttgtcacagatggaggagacctctttgtttgtggcctgaacaaagatgggcaactggggcttggtcacacagaggatatcccatattttaccccctgcaaatccctctttggctgtcccatccaacaggtggcctgtggctgggattttacgattatgctcacagaaaatggtcaagttctatcatgtggatccaactcctttggccagttaggagttcctcatggacctcgaagatgtgtggttccccaggccattgagctccataaagagaaggttgtttgtattgctgctggactgaggcatgcagtagctgctacagcgagtggcatcgtgttccagtgggggactggtttggcatcatgtggacgacggttgtgccctgggcagactcttccattgtttttcacagcaaaggaaccaagcagagtgacaggtctagagaattctaaagcaatgtgtgttcttgctggctcagaccactcagcttcattaacagatgcaggagaggtgtatgtttggggaagcaacaagcatgggcaactggctaatgaggctgctttccttcctgtgccccagaaaatagaagcacattgtttccagaatgaaaaggtcactgccatctggagtggatggacacacctggttgctcagacagaaactggcaagatgtttacctggggccgagcagactatggtcagctagggaggaagttggagacttatgaaggctggaaactagaaaagcaagattcatttctcccctgttcaagaccaccgaacagcatgccttcgtctccgcattgcttaactggagcaactgaggtctcttgtggctcagagcataatttggcaataattggtggagtgtgttactcttggggctggaatgagcatggcatgtgcggagatggcactgaagccaacgtctgggccccaaagccggtgcaggctctgctgtcatcgtcaggactccttgtgggctgtggggctggccactccttggccctctgccagctgccagctcaccctgcattggtccaggaccccaaggtcacctacctttccccagatgccatcgaggacactgaatctcagaaagccatggacaaagagagaaactggaaggaaagacaatcagaaacttcaacccaaagccaatctgactggtccagaaatgggggactgtgatagagaatctttaataaagtggcttttcccaccaaaaaaaaaaaaaaaaaaaaaaaaa

SEQ ID NO: 360 - DNA, 717 bp, Homo sapiens
gcacgagggctacggccctggaacggggccatggagaagctgcggcgagtcctgagcggccaggacgacgaggagcagggcctgactgcgcaggtcctggatgcctcatcccttagtttcaacaccagattgaaatggtttgccatctgcttcgtatgtggcgttttcttttctattcttggaactggattgctgtggcttccgggcggcataaagctttttgcagtgttttataccctcggcaatcttgctgcgttagccagtacatgctttttaatgggacctgtgaagcaactgaagaaaatgtttgaagcaacaagattgcttgcaacaattgttatgcttttgtgtttcatatttaccctgtgtgctgctctttggtggcataagaagggactggctgtgttattctgcatattgcagttcttgtcaatgacctggtatagcctgtcatacatcccatatgcaagggatgcagttattaaatgctgttcttctctcctaagttgaaaatcagaaacttgtggaaaagagcacttgaatgttggtactctatgtttggtgaagtttgcttttccccataaaacactccaggaacaactgacgtgacagttgaagaccgttttgtactaagtctcattttgtatactggtaaaaactacatgcttgattaaaccattaaatgcttgtaactttaaaaaaaaaaaaaaaaaaaaa

SEQ ID NO: 361 - DNA, 6162 bp, Homo sapiens
attgatctctgttgccgctcagggaggtcagctccaggccctcagcctttcggccgggagccaaactgccctgcctgccaagcccctccttctctgcaccttaaacagccgcgaggggagagtcggctgggattttcttcttaagaagtcgcgcaggtttttcgagctccactctgcgccaggagagccacggcagcaggaacgggcactgctgccaccgggccgacggagctgcatcctgtggccctataacactcttctccaaaaggacctgccagagactgggagtgttgactgctgcaaggaccaaggtgggatagtaacatctttttgagggaagaattggcttcctttcttgaaagtggtgaaggtacagcatatagctgcatggaagaaacagtaatcggatggctaccttctacattttgtattaggaaacaaagtccattgtaagagtccatgttgatcttggaaatagaaggattgaaaaaagctaaatttccacaaagaacaagaacttgaccatctcctttttgatctgaagactaggggacaatggatatcatagagacagcaaaacttgaagaacatttggaaaatcaacccagtgatcctacgaacacttatgcaagacccgctgaacctgttgaagaagaaaacaaaaatggcaatggtaaacccaagagcttatccagtgggctgcgaaaaggcaccaaaaagtacccggactatatccaaattgctatgcccactgaatcaaggaacaaatttccactagagtggtggaaaacgggcattgccttcatatatgcagttttcaacctcgtcttgacaaccgtcatgatcacagttgtacatgagagggtccctcccaaggagcttagccctccactcccagacaagttttttgattacattgatagggtgaaatgggcattttctgtatcagaaataaatgggattatattagttggattatggatcacccagtggctgtttctgagatacaagtcaatagtgggacgcagattctgttttattattggaactttatacctgtatcgctgcattacaatgtatgttactactctacctgtgcctggaatgcatttccagtgtgctccaaagctcaatggagactctcaggcaaaagttcaacggattctacgattgatttctggtggtggattgtccataactggatcacatatcttatgtggagacttcctcttcagcggtcacacggttacgctgacactgacttatttgttcatcaaagaatattcgcctcgtcacttctggtggtatcatttaatctgctggctgctgagtgctgccgggatcatctgcattcttgtagcacacgaacactacactatcgatgtgatcattgcttattatatcacaacacgactgttttggtggtaccattcaatggccaatgaaaagaacttgaaggtctcttcacagactaatttcttatctcgagcatggtggttccccatcttttatttttttgagaaaaatgtacaaggctcaattccttgctgcttctcctggccgctgtcttggcctcctggctgcttcaaatcatcatgcaaaaagtattcacgggttcagaagattggtgaagacaatgagaaatcgacctgaggagcaaaacaaaggcatcagctcttacaccaaaagagttaacgctgtaaccaaaggtatagttttgttttttattttaggagaactgactggtaaatgaagaaatggaccaaattttgtgtaaacgattagaaagatgaacaaagtattgccctttgactggttttcttcttcatcctgagaaagatacattctcttgcagctcttcattcattggtgacaagcccccaccccgggactttactaatgagcttgttaaagaggtgccaaagaacatattcctcctttctttattctttctccaccaaaaccctctacttcagaattttttcaggatatttttcagcccaaggtcagaagaatgtgttaatattttaaataaaatatctggacatctacagccactgtgtaaatagaactgcctaatgttgagagtggtttttagcattaggtttagcaagggggagatccgtgggttgtgcgtcagctttgggtgaattttgtttctaccctgtcacggggaaagttcgggttgagtccaggagtgcacactgctgctgccacccaatgcgctacatatcacttttttttgttttgttttgttttgtttttaaaagatcattttatcttaaaaaggaaagctgatccaagtaaacacgaaagtatttgacacaccccacagattttacatgtgtgtaaatgtttcactttaaaatctctatgacagatacacaggaaacatgagatggtttctgctaatgagtggcccttgagtacacacttagatgctgtctgccctgtaaatttggatctggtgccccagggcagtcaactcttctagcacaggctgaaaacacgtgtgtgtcaactgaggttcacaccacttggggaatgagcctgttttctttccaggtcaggccctggtgtgagatcaattttagggctcctaattggagcacagaaatgtatttggtcaaatttcattgaaggtgatttcttcctttttctgttgtactttatggaaaaaccaagatggaacctgaaagttaatgtatccttgcttttagcaagagactcagtttcttataactagtcctaaggacatatgccgcaattgagtaattttacttttaccctatgaaaataacatggtgctgcactataatatactctcggaatcagtgtgttagttacagctatacagtgaagggggataactgtttctaaatttctttaaggtgatgccaaaaaatggattaaaaaatctgatcagatttaatgttaccagatttagtgcattatttaatgctattggatcttttggataattcttggcttaatttcttagctacttgaaggttaatttgcaagacttttaaaaccttagaaaagttttaaggttgcaaagttatcaacactggggcagagggtggagaggccaatgcgggtagaaggaggcagttatgtttatattgaaggtgaaatttttctttcatttagaatggaaaacatccccaaatgtatcattataaactagtcagccttgactacacaaaattgacctttaagttgcttgagaaaaacacaatgcaaatcgttcagaagggtcaacatcctttggtgctaaaatcttgtgtatgttttcagaatggctttttctgtatgttatagaataatcactaaaggaaaggtagttgaatttaaagtcatgaagcaagactctttaattcagttattttaaacaagaattaaaaccccaaacatccttggcaggctttgaagcacacagaattttctagtatttcttattaaatacaccaataataaacatatacttagtttacctgatgagtttagacataattctatataatgttcgcttatattcatttattaactagcaacacttgtgcaagaacaaggtattctgcttgaaaacactgatttttaagttcctgttgcccgattgtaaagaaaatcatctgacacagaagcctggattttgctctcctaacactggtgttttccttgagcctctaattcaaataaaacaaactgatacaccttacagccttattcatctgtgtctggataactcacttttcatctattgaataagaaaaagtgtttaaacttaataaaataaaaaattgtgcaccaattactacagatccttgaaacagtaagccttggattttagtcaagtaatccagtttttttttaatttaaaaaaaaccatcaccttttaaagaactttaaaaacacctgtgatgccaatgtggacattgccgctgccatgtctttacacgcatgtgtcgtatagctctgtcatcgagttgaggaagtccatggtttgcaaataagggtgggggaatcaaaatttcaagatggaaaaataaaacaaatagtaaaacccatttacatgtaggaaagaaaagttgagcttcaacccaatgtgccactttgatataaaacaagtatgatatatatataaactgaagatataaaacaagtatgatcttgcctttgaaatcataaatgtttggggtacctgttctttgccagttaagatacatatcttattatctttgtttttttcaagtctatgctcctgtttgaagcttttcctgtaatttaggttgtctgtgaaatacctataacatataattcctatagagtatgccacattttttttctaactcatttcaaatgaaattctctcagattctagtttttgagcttgtccactagatctgaaaataaagcatcctttcctgagtccacttgaactaattgtgaatttgttacttaatttactggcatcttgggaaacaagttttgctgtggcaggaaggctgttttgagagtgagcgttgagtctactctggtttgtggatgacattgcattagggttatttcctgtattaccagtgcccccttgtggcaatatactttatgacttggaatgcaaacaccacttttaaaagcctgttttcaagtttttgaaaggcatttgttttctgttgtttgccaataatctgaaagtatcatgtgaaaggaattattttaaaagcattttaaacctttcccaaaggtaaaatgtgctcagattataggcacttgtaattctaaccttgtatccatttgatcaaagaaaatttgtagaacatttttacctctcatgatcacaatcattagtgtctccctttataacgacctatgttttgtttactttgaaacaccaaatttgttgtcttggttttttttacatgacagaactcatgcagtttcttttttagttgaaagttcacatcttgccccttgaatagtttgaacatttctttcttaattcttttttgtttttgttttgcactgtaaaactgatgaaaactttaagccaatcttaatgcactagcctctgtagtgtaaggaagtgtgagaaggagtttcttaatgagtttacacgtttaaatcaagcatattataagttatatgccatgtgttgaaggcttttctatttatatatataaagatttttagtatttgtttttagtgtccttgtgttgcaataatttaactcctttgactcagttgctgaaaatatttcttctattaagaagtgctcttgacttcaacacccaaacactgaaaatcatgtcaatgttacccaaagataagtttttatacagatacacaccttataagttctgatttattttcttactcattatgctgtgttctaaataaatcatgaatgagaagagtgctttattgtgaaattatttaaaactgtcctttaaaagaaaaagaggaaacgatgaacaaaaactaatctaattgccaagttagaattcattatttaatttacctcctatgcaatgattaatgctgcaaaatgtatggttatgttaccgtatattcacaaaagaaatattattacaaggtttcagaggtagccaattgcattcttttggaaatttactgtactgtttcaatgtgttaagtgccttgttgtaaagtaaaattttaagtctagattcattattttcctgacatatatttttcattatgatatctactgtatgctattgtgatagttttatgaaatgcttacattttaatcaaatatgtaaatttcagaagctcttttttcctacccaccagtaccttaatcattggtttatcacattggattcaaattcaggttccttttttgataaagaggaaatttgttttccatgcttgtgattttgtgtttgtaaacatttcaggaggaatttaggagtgtaactatagtttatacttctataatgttgtcttacatttacatttttaagtgcctaattgttaaaactgatttatgtttctcttctaaagaggatatgtgtacttggtttctaatctctttggttttgctttttaaaaaatgcaagagcctatactttgtatttacctaataaaccacagtgacatcaacagtcttttcaaaattaaaaaaaaaaaaaaaaa

SEQ ID NO: 362 - DNA, 2214 bp, Homo sapiens
cctgtttcccaggaacggtccccggcttcgcgccccaatttctaacagcctgcctgtcccccgggaacgttctaacatccttggggagcgccccagctacaagacactgtcctgagaacgctgtcatcacccgtagttgcaagtttcggagcggcagtgggaagcatgcgggactacgacgaggtgatcgccttcctgggcgagtgggggcccttccagcgcctcatcttcttcctgctcagcgccagcatcatccccaatggcttcaatggtatgtcagtcgtgttcctggcggggaccccggagcaccgctgtcgagtgccggacgccgcgaacctgagcagcgcctggcgcaacaacagtgtcccgctgcggctgcgggacggccgcgaggtgccccacagctgcagccgctaccggctcgccaccatcgccaacttctcggcgctcgggctggagccggggcgcgacgtggacctggggcagctggagcaggagagctgcctggatggctgggagttcagccaggacgtctacctgtccaccgtcgtgaccgagtggaatctggtgtgtgaggacaactggaaggtgcccctcaccacctccctgttcttcgtaggcgtgctcctcggctccttcgtgtccgggcagctgtcagacaggtttggcaggaagaacgttctcttcgcaaccatggctgtacagactggcttcagcttcctgcagattttctccatcagctgggagatgttcactgtgttatttgtcatcgtgggcatgggccagatctccaactatgtggtagccttcatactaggaacagaaattcttggcaagtcagttcgtattatattctctacattaggagtgtgcacattttttgcagttggctatatgctgctgccactgtttgcttacttcatcagagactggcggatgctgctgctggcgctgacggtgccgggagtgctgtgtgtcccgctgtggtggttcattcctgaatctccccgatggctgatatcccagagaagatttagagaggctgaagatatcatccaaaaagctgcaaaaatgaacaacatagctgtaccagcagtgatatttgattctgtggaggagctaaatcccctgaagcagcagaaagctttcattctggacctgttcaggactcggaatattgccataatgaccattatgtctttgctgctatggatgctgacctcagtgggttactttgctctgtctctggatgctcctaatttacatggagatgcctacctgaactgtttcctctctgccttgattgaaattccagcttacattacagcctggctgctattgcgaaccctgcccaggcgttatatcatagctgcagtactgttctggggaggaggtgtgcttctcttcattcaactggtacctgtggattattacttcttatccattggtctggtcatgctgggaaaatttgggatcacctctgctttctccatgctgtatgtcttcactgctgagctctacccaaccctggtcaggaacatggcggtgggggtcacatccacggcctccagagtgggcagcatcattgccccctactttgtttacctcggtgcttacaacagaatgctgccctacatcgtcatgggtagtctgactgtcctgattggaatcctcaccctttttttccctgaaagtttgggaatgactcttccagaaaccttagagcagatgcagaaagtgaaatggttcagatctgggaaaaaaacaagagactcaatggagacagaagaaaatcccaaggttctaataactgcattctgaaaaaatatctaccccatttggtgaagtgaaaaacagaaaaataagaccctgtggagaaattcgttgttcccactgaaatggactgactgtaacgattgacaccaaaatgaaccttgctatcaagaaatgctcgtcatacagtaaactctggatgattcttccagataatgtccttgctttacaaaccaaccatttctagagagtctccttactcattaattcaatgaaatggattggtaagatgtcttgaaaacatgttagtcaaggactggtaaaatacatataaagattaacactcatttccaatcatacaaatactatccaaataaaaataacatcattgtattaacgcaaatattaggtgacaacaaaaaaaaaaaaaaaaaaaaaaaa

SEQ ID NO: 363 - DNA, 6330 bp, Homo sapiens
tgacgcccccgaacccagctgcagaagctgccgccacctccaatgcacaaggtgtctcatctgaaaagaaacctgagccccagggaggcggcgcggagcgaccctggcagagctggcgcaaacagggcgagaggtcgctgggcagcgttcgaggaccagagggagctcggccacagaagaccccagtgatctgatcccgggatcccggctccaagctctcctcgcattttacagatttcacccccgcgactatctccccaaaacggagcctttatatcaagagaaggtgcgggagctggggcaaccaggactttctcgggcacccaagatgcgctccattaggaagaggtggacgatctgcacaataagtctgctcctgatcttttataagacaaaagaaatagcaagaactgaggagcaccaggagacgcaactcatcggagatggtgaattgtctttgagtcggtcacttgtcaatagctctgataaaatcattcgaaaggctggctcttcaatcttccagcacaatgtagaaggttggaaaatcaattcctctttggtcctagagataaggaagaacatacttcgtttcttagatgcagaacgagatgtgtcagtggtcaagagcagttttaagcctggtgatgtcatacactatgtgcttgacaggcgccggacactaaacatttctcatgatctacatagcctcctacctgaagtttcaccaatgaagaatcgcaggtttaagacctgtgcagttgttggaaattctggcattctgttagacagtgaatgtggaaaggagattgacagtcacaattttgtaataaggtgtaatctagctcctgtggtggagtttgctgcagatgtgggaactaaatcagattttattaccatgaatccatcagttgtacaaagagcatttggaggctttcgaaatgagagtgacagagaaaaatttgtgcatagactttccatgctgaatgacagtgtcctttggattcctgctttcatggtcaaaggaggagagaagcacgtggagtgggttaatgcattaatccttaagaataaactgaaagtgcgaactgcctatccgtcattgagacttattcatgctgtcagaggttactggctgaccaacaaagttcctatcaaaagacccagcacaggtcttctcatgtatacacttgccacaagattctgtgatgaaattcacctgtatggattctggcccttccctaaggatttaaatggaaaagcggtcaaatatcattattatgatgacttaaaatataggtacttttccaatgcaagccctcacagaatgccattagaattcaaaacattaaatgtgctacataatagaggagctctaaaactgacaacaggaaagtgtgtaaagcaataaagcacattttgaaacaaacaatatgcacttcttttctgaagatgcttccgaagatttgaaaataggatccaaaacacggctgggtttcagcatccaccaatgaactgaaaggtgaataaaggacgttcatgagaaatcgactaccagctgatgaaatacctgcaaagtgctctaaaaattaaatattttgactttaagggtcctagtaagtgccacttccactaagaatacagtttgaatgtataatcagtagtgtttacaagatccaacagtgcactcatcattagttaacaaagcaaatatgttcatcactgtcaggctgcccacagcaacaccaagcatattagaagaggaaccccaggaacgcaactcagaccttgggaaattaaaccatccttgtcagcagaagccaagatggaagcagtttgagcaatgaaatccgtaagattaaacaactcaagtaaatgcttcagtcaggactctgagtctgatcatgaattttatgttttaatttatgttttttttttgtcttctggaatctcttttggtttggatattgggatgcttagaaatcctttctgagatgcatatgagtgaggaaataaactttaagtaattatttttaaagttcttatactttttaaaagctatcacacaaagacttttttttttttttttgtctcgctctgttgcccaggctggagtacagtggcgcgatctcagctcactgcaagctccgcctcccaagttcactccattctcctgcctcagcctccggagtagctgggactgcaggcgcctgccaccacgcctggctaattttttgtatttttagtggagacggattttcaccgtgttagccaggatggtctcaatctcctgacctcgtgatccacccgccttggcctcccaaagtgctgggattacaggcgtgagccaccgtgcctggccgacatttttaaaaaagttttattttgcacggctctaaacctccatgttattttccagtggtgtagaaggtaccagctaaagtgaaccactatgtaatattaggccattctaaaggaaagatgttccatgtcatcagagatggtaaaataggccgggaaaaaaaaatctttggtaccaaagattacacttgtgtttctacacagcaaaccatttttctttcatgaaaataatatattattaacatgaatatattattttgctattaatgtgaaagttgtctctaaatattttttaattttcaaactcatactttattttcatttgaaatgtttttcacaccttttgcattacataataattttgtggaagcattttgccctttagaataaatattagattgatatagctgaaatgtgacttccagttctttgatattccccttgttattcaaatagaaatatggaaatgctttatatattactgttaaatttcttagtgcagaaataacattattaatagagtattgttttcaaaacagagatgattaatttcaagaggtttaacagtgaaattgtgtcaatattttgcatttaaaatgaatttaattgaccgatattttctgtagttaaatttagtcacaatatcacatatgttcttcaagaaacacatgaaattattaataaagtaattaaaaaatttttaatgtataacagaattgaccaataggccagttttctggtaacttatgatagtagattgtttctttagaaactgggcagaagctctgcattctcacttgtactttgatttcttatttcttgggcaggcaatttgaggaaagaagaaatggcatggggaatatatatgttttgtttcttagggaaaacagtctgagaaatgaataaaaagcatgaagtacgtgtgtgtgtgtgtgtgttaccatggaaaaggatattcacagtagtacagttctcaatatttttaattagatgtcatatttttttaatatagtaaaaccttgggatatagaatattacatcttttgagaatgtatgtgtctctaagtaagtaaaatctaatgcgtataggagactgatagctaaaaatgaatggaacattaatgtacttttataattaaacctcttatctatcagaaattgtaagagaatagatacatgttttgaatgtaaagttgaaaagtctggtttacttaataaattgaaagtgatttataaaatctaaatttggactacttgcaaatgataagctattctagtagcctttagtttaaatccaacagaaatctagaagtcacaagcaaatatcttaaaggtaaaatccatctgggcactcatttaaagtatatcttaaaaaagcagcagcaaggtaccttgccatttttagcatattttcttcctttttcttttttcttttttttttttttttgagatggagtctcactctgtcacacaggctggaatgcagtgatgccatctcagctcactgcaacctccacctcctgggttcaagtgattctcgtgcctcagcctcccaagtagctggggttacaggcgcccaccaccacactcggctaattttgtgtttttagtagagacaaagtttcaccatgttggccaggctggtcttgaacttcctgacctcaggttatccacccacctcagcctcccaaagtgctgggattacaggtgtgagccaccgcagccggaccatttttagtatattttcagtaaatacatttaaacaatgttaaggccacagcacacatatctcagccattcattgttctgtgcattgatgtttatctcatagatgcattgagtagtgcctttttagctttttcacattactttgtcaccatatcctttgtgttctctaaatacattgcccacttccaaaaatgttcagcatgaaaaaaagggcttcagtgtcgattgagattgcttttgttcatctcagggatttcaatagtcaagaatgaattcagttaaaggtatttagggttcaaagaagacaaactgtacaagcccatttcattccttgttgtatacctttccatctgccctcccattttaactatctactgtggcctttttatggaaacagagcaagatcaatgaaggctaatggcaagaataagaaaaagagttgagatttaaccaatagcggagcataaaggatcatgacaaaatcaaattataaaagcatacttgaaataggtggagctttttcttttgaaaatatatattcacaattttaatattttaatttattttttactatttaaccctgtacttggcaatgctcaggcagctgattgtgaaatattcttgtcctttacagaacatggttgttattgtgctgttgacatgaatagaccatggaaacattttcatcattattattcagcctgtgctgtagttaatgttaagttgctgaaataaaaagtgagcaagtaatagattttcttggcaaatctaatgattcagcccacaggactgttgaaactactgcggaagtttttctatctgaaagaaggtgctgggcattcaaatgtgttcatgtattgtatatcatatgaattgtatatcaattactaatgggaatttctacatatatgcttacaaaagcaatttatttaagtaatgctaggggtagtgtacataccaattagttattcagctactatacagaaaaaggatgaacaaattaatttatttctaattgagccagttagacataatgcatataacgtgatatttggttcatgaaagagttgttttcatgtggttattgtagggagtatatataattgtggaaggggtatgggaagagttgtgtatagttagttgttatctctacaagtttgaaagttttcccatcaaacattatcaatataccaatgttttaaaaattgagtgagggttattatttgtatttgatgaaagaaaatccaaataaagcccacctagaaatagatattttattatatatgtgctatagatatacctatatagtacaaatagacatgtgtgatgcatatatacaatgttatatatgtgtatatgtctgtatacacactgagtctgtaatatgtatacactaaatttgtgttatgctaacatcttcagggtctgcactgtgaactcccctggagataagtaagtccactttagaataaagaagttcttttgagacttcagttactaacgtgctttaagaggtatctactttataactgaattctatgtcgttcatacgtagagttacagtaagggtctagtatgtccaaatcttaataataaagaagaaaagtaaaggcttcaagctagcaatgtattcgaattacagttttcagattgtggctccaggccttgtgtttctcatttaagtagcaccttttaataaaaaccgtttctttgtgtaggcaaaagcacaagtgtttcaaatgtaaatagcaggaaaaaaaaagagtttacagagatagcattgctgcacagaataattgctactgagtatttcttatagaatttgtggaactgaaagatgaggtttattctgtcaagttcaagttcattctgttcaacactgttttcttattgtttgtgtatagcaaccgggtattattgttttatcatttgtaaaattgtaaaataaattaatccctttttttcactgtttctcttatctcatatatccaagcccttggttatactttgtatgtcaatgttaggtgatcatttttaacaagctttggcttgtgctttgcttttccactccccttagccctagtggttggcaattaggcaaaccatttatttttaagtgtatacatgggaatatgaacaatgtcaaaaaccccatgaatattaggaaatccttaacgatattttgtgtagcacattctgtttgcggttgagggaataaagtatttcacaagtgaaaaaaaaaaa

SEQ ID NO: 364 - DNA, 3894 bp, Homo sapiens
gcgcggctgcggggcggagagctgcggctggcccagcgcgcccacctgaggaggcggcggggtccgcaggcgtcgcgggacgaggagatcggagccgggagactcgcgcagcgccatggcccccattggcctcaaagctgttgtcggagagaagattatgcatgatgtgataaagaaggtcaagaagaagggggaatggaaggtgctggtggtggatcagttaagcatgaggatgctgtcctcctgctgcaagatgacagacatcatgaccgagggcataacgattgtggaagatatcaataagcgcagagagccgctccccagcctggaggctgtgtatctcatcactccatccgagaagtccgtccactctctcatcagtgactttaaggacccgccgactgctaaataccgggctgcacacgtcttcttcactgactcttgtccagatgccctgtttaatgaactggtaaaatcccgagcagccaaagtcatcaaaactctgacggaaatcaatattgcatttctcccgtatgaatcccaggtctattccttggactctgctgactctttccaaagcttctacagtccccacaaggctcagatgaagaatcctatactggagcgcctggcagagcagatcgcgaccctttgtgccaccctgaaggagtacccggctgtgcggtatcggggggaatacaaggacaatgccctgctggctcagctaatccaggacaagctcgatgcctataaagctgatgatccaacaatgggggagggcccagacaaggcacgctcccagctcctgatcctggatcgaggctttgaccccagctcccctgtgctccatgaattgacttttcaggctatgagttatgatctgctgcctatcgaaaatgatgtatacaagtatgagaccagcggcatcggggaggcacgggtgaaggaggtgctcctggacgaggacgacgacctgtggatagcactgcgccacaagcacatcgcagaggtgtcccaggaagtcacccggtctctgaaagatttttcttctagcaagagaatgaatactggagagaagaccaccatgcgggacctgtcccagatgctgaagaagatgcctcagtaccagaaagagctcagcaagtactccacccacctgcaccttgctgaggactgtatgaagcattaccaaggcaccgtagacaaactctgccgagtggagcaggacctggccatgggcacagatgctgagggagagaagatcaaggaccctatgcgagccatcgtccccattctgctggatgccaatgtcagcacttatgacaaaatccgcatcatccttctctacatctttttgaagaatggcatcacggaggaaaacctgaacaaactgatccagcacgcccagatacccccggaggatagtgagatcatcaccaacatggctcacctcggcgtgcccatcgtcaccgattccacgctgcgtcgccggagcaagccggagcggaaggaacgcatcagcgagcagacctaccagctctcacggtggactccgattatcaaggacatcatggaggacactattgaggacaaacttgacaccaaacactacccttatatctctacccgttcctctgcctccttcagcaccaccgccgtcagcgcccgctatgggcactggcataagaacaaggccccaggcgagtaccgcagtggcccccgcctcatcattttcatccttgggggtgtgagcctgaatgagatgcgctgcgcctacgaggtgacccaggccaacggaaagtgggaggtgctgataggttctactcacattcttactcccaccaaatttctcatggacctgagacaccccgacttcagggagtcctctagggtatcttttgaggatcaggctccaacaatggagtgagagccaaagaaacaaagatccacacacatcctcaccccacagaaactgctggacacactgaagaaactgaataaaacagatgaagaaataagcagttaaaaaaataagtcgcccctccaaaacacgcccccatcccacagcgctccgcagcttcccaccaccgcccgcctcagttcctttgcgtctgttgcctccccagccctgcacgccctggctggcactgttgccgctgcattctcgtgttcagtgatgccctcttcttgtttgaaacaaaagaaaataatgcattgtgttttttaaaaagagtatcttatacatgtatcctaaaaagagaagctcatgtgcaattggtgcacagcaggagaaatttctggactgttaggatgaatggacgccttctccccgttatttaagatttgtgaccttgtacataaccctgggtgacgtgcacattgcttgggtatggaacggtagaaatttgggtgtttttaaaaccttgtttggggttgttcctgtccttgttgagaatcatagagatgtctgtgttcttggagtatttcacactgaggactaatctgctatcttcattccagtccctacccctcagtgcctgctctcatccaaataacctgggaggtgacaatcaggatatctcaggaggtccaaggtggaacagacctctttgcctttcccagcgtctcatacccccggtagtgcagctgtgggtggaggctggggtgtctgcacgaagtcaggccagcgtcctcctccacagcctgtcactgccccctccccagcctgtgtccacagtgctgtgatcccgagggaagtcctccagtctaagtcacagtgccctgacaggtgagaagcaaactcccgctggaagcctccatctctttggaaaaacagttagtctggagcctgtggcccaggcccttctgtccccaggcatcatcccaacagctcattttccctagtccgccttcgttcaagggtcaggaatggaccagaacagatgggttctggaggcccctgaacagagggctatggctgtggagaaggttcttggcccgttggactcacacagaccctgtaccctctcggcaagcatcttcagtcagattatcctcagtttcagatacttcataataccttgtgttgtgtggggtcatacatcatcgtgtttgtaagagaagatggtcattttattctctgtataaaacttagctctaaagcagaaactaaagcagcaaatgcaggaaggctgtctcgccatcctcaagactcagcagctctcattctccagtggtgagcacaccatttgtgctgctgctgttgtcgtgaaatataataacagtggaagtcacaaaaatgtcccctgcccagccccctcgccgcccttgacctcctgcaggccatgtgtgtattacttgtctagtgatgtcctctcaaagtgctgtacgcgagctcggcgccacctccgcctccctttcagagcctgctccccgccctctctgctcgctgcattgtggtgttctcttctcaaggctttgaaatctccccttgcactgagattagtcgtcagatctctccccgtctccctcccaacttatacgacctgatttccttaggacggaaccgcaggcacctgcgccgggcgtcttactcccgctgcttgttctgtcccctccctcggaccaaacagtgctcatgcttcaggaccttgtttgtcgaagatgttggtttccctttctctgttatttatataaaaataatttatcaaaaggatattttaaaaaagctagtctgtcttgaaacttgtttaccttaaaattatcagaatctcagtgtttgaaagtactgaagcacaaacatatatcatctctgtaccattctgtactaaagcacttgagtctaataaataaagaaatcagcaccccttcccggtgtccagggggaaaaaaaaa

SEQ ID NO: 365 - DNA, 3493 bp, Homo sapiens
gtcggttgcagctggcagtgcggcgggcgcgggcgccggagcgaggggcccgcgggcccggctattaataacgcggccgccagcccggggtcgcgcagccatggccagcccggagccccggcgcggcggggacggcgccgcccaggccgcgaggaaaacaagagtagaggccaattctcctcttccaaagaactctggatccctaaatgaggcagaagccttgaacccagaagttactctatcttcagaggggtccttaaacctcgaagacattctctacctggaggacacaggtgaccttgatgagacactctatgtgcaagagactgagaaggcagaggaggccctgtatattgaggaggccatgcagccagatgaggctctgcatgtggaggagcctgggaatccagaggagacagtgtgtgtggaggaaaccacggagccagatcggatacagtttgtggaggggcccgtggagccaggaaagcccacaagcccagagcacgttgtttatgagggagagacagtcacaagggcggagaaatctaaccctgaggagagcctcagagccgagcagagccccagcgtggaggagaacctgagcatagaggacctggaattgctagaggggcgtttccagcagtgtgtccaagctgtggcccagctggaagaggagagggatcagctcatccatgagcttgtattgctccgggaaccagccctgcaggaggtacagcaagtccatcaagacatcctggctgcctacaagctccatgcccaagcagagctggagagagatggcctaagggaggagatccggctggtcaagcagaagcttttcaaagtgacaaaggaatgtgtggcctaccaataccagctggagtgccgccagcaggacgtggctcagtttgccgatttccgggaagtgctgactacaagggcaacccagctctcagaggaactggcccagctccgggatgcctatcagaagcagaaggagcagctgcggcaacaactagaagcccctccaagccagagggatgggcactttctccaggaaagccggcgactctctgcccagtttgaaaatctcatggcagagagccgccaggacctggaggaggagtatgagcctcagttcctgcggctcctagagaggaaagaagctgggaccaaagctctgcagagaacccaggctgagatccaggaaatgaaggaggctctgagacccctgcaagcagaggcccggcagctccgcctgcaaaacaggaacctggaggaccagatcgcacttgtgaggcaaaaacgagatgaagaggtgcagcagtacagggaacagctggaggaaatggaagaacgccagaggcagttaagaaatggggtgcaactccagcaacagaagaacaaagagatggaacagctaaggctcagtcttgctgaagagctctctacttataaggctatgctactacccaagagcctggaacaggctgatgctcccacttctcaggcaggtggaatggagacacagtctcaaggggctgtttagaaatatatggccaaatctgtaacccggaaacagcaaaaaacttcttagcaaaggatcactaagtaccctttggatgtactcttccaaccagacaagagtgccagaaacttggcaagcaattcatcctgtggaagttgcaaatactggctgacctgcttaaaaagattctagagttggccggaggcagaacatgtcaactctttgctggattctatttcatctgctgttgatactgatctcaatgcaccaaggaaaggaaagatgagcctcctgtcttccagcaacaaccctcacatatgcactgagtaaaggatgaatgtatggacacatctgggagtattttaaagaatgtatcttgccttgtgttgacccaaaccaaaaacatttttgaggggcacatgtggggtcaaaaagatagccaatttccattacatgggtttacaatttccattcttttgtgccacgagtgttagaatttaaatgaatacttttacaaagtctactttttgttcaaggatatgctgacccatatagtttactcttaaaattgtgtcaaggtatttctcactatactctaaaacaactagacttgaaaagaaaccatttgagatttgaatctaatggttaacgctattcagattttcccaaagatcttacctcatgaaagtagttctgggtcagaatgatctactcagttaaaaaacaacaacaacaaaaaactaagcgattgggaaaaaacaggaattttatctggttattgcatctggtgatagaggccttcaaagcctattatttctaacctaagtaaaggccccagtgaaaaacatactggggaaataaaacctctgagaaaaggttcaagcaccttttccaaatttaaatcttgccttaaattctctctaccacactgcctttgacactcttggaagtccatgtagttctctacagatagacttcaaagaaacgttaccttatcaaagactaatctgtgccacctctgattcagtgttttatgtctttcactttccctgggaaggagtaaagttcttttctacagctctgggactattacatttaattctgctcttgatagtcaaagaccatggacaacaactgtcatctgaaggactcttctagaagccagagactggtgtttgatggatgttttatactaaataaaacccatcagcatggggttatgtagaaaagcaatttattccattttaagcacttacacagttagtcatggagagtaacaggcctgctggtgaaacaggtcacccaaaatggagatggcatcaaactagtggtcaaggactaactcctaaaaaaaaaaagcaactcttatcaaggattaatttaatttttaaaacaaatacaagttattgattcactcttctcaacttgacagtctacctgtggtataactgtcaggtaaaaacatacatctttacaacttggtggtcccaagttaaaaaaaaaaaaaaaaaaaccaacaacaaaaaaaaaaacaccatttcacagacaggaaataaacaacatgaaaacagctcaagaaatacactaacgagcaaaaatatatgaatatatggggaaagaggaacgtgttgttttgacttaactgaagaaaccaagaggaaactggtctacgtatgaaaatgtgcatcctggaaagtcaggtgtcaagattttcgagtaggaatctatatgacttgaatctccccctatttcctgaataaaagtgacatctttcagtatttatacttcatggctcagacacctacctcatttggctctattccttactcactctagcctttacttaaatgagtctgaaaaacttggggatatagcataagaagaaaaataatcacacataatattcccctttctgtagctactttagacctgggttactagaaaattcctgaagaaaatttcaac

SEQ ID NO: 366 - DNA, 2183 bp, Homo sapiens
gagcgcacgcgtacacgcgtgcgcaggggaagaccgagtgccaggggctgaaccgcagggaagggggcgcggcgcacgcagtatggcgcccaacatctacttggttcgccagcggatcagtcgactcggccagaggatgtccggcttccagatcaacctcaacccgctcaaggagccactcggcttcatcaaggtcctcgagtggattgcttctatctttgcttttgccacctgtggaggttttaagggccaaacagaaattcaagtgaattgtcctcctgcagttactgagaataaaactgttacagctacttttggttatccattcaggttgaatgaggcatcatttcagccacctccaggtgtaaacatatgtgatgtaaattggaaagattacgtcctcataggcgattactcttcttctgcacaattctatgttacctttgcagtctttgtgttcctgtactgcattgctgcccttctgctttatgttggctacacgagtctgtatctggatagtcgtaaacttcctatgatagactttgttgttacacttgttgccacttttttgtggttggtgagcacttcagcctgggctaaagctctgacagatattaaaatagctactggtcacaatattattgatgaacttccgccttgtaagaagaaagcagtactgtgttactttggctctgtgaccagtatgggatccctaaatgtatctgtgatatttggctttctaaatatgatactctggggaggaaatgcttggtttgtgtacaaggagaccagcctacacagtccatcaaatacatctgcccctcatagccaaggaggtattccacctcctaccggaatataattaaagggagaaatacactgtatgaagtatatgttgatactatgacatgttgccaacaccttgagaagcattatttgtttctaataaaagtaatggctttgtcaatatattggtgggtttaaaactttgctgcttttttacataaagcctgtgcctttcctagaaagttaagatgtaaatgtattctcacatgtaaatttgaaagttcaggggtctattatgaaatgatacacatttttaaatgaaccataatttttttcactaagctgtttgccttccaaagtgtttacaccttaagccttaacatgtatcttcattcagaaaacagttatattgtcataccatagtaggaagaaaaacctttatttggaatatacactactgtaagtttgtacagatcatatacctaccacctgtctttgcttaaagagccttgattacataaatatgtaggaaaaaacatattgagttcaaaatttatatctaacattgtttatgttatgatttttttttaattgcaaagactaggtgtatatttttttctgtttttctaaatgacccgtggtacttaataggtgtactaaaattgtgttgggagcagggatttggaaatttctgagagatgtgtagttaatttagtaattctgtttcatgagatatgatctgttatgctagtggtttaataggcttgctatgtaagtagaacgtggctcaactagatatctttatatgtatgggcattactcttagtgatatttgtttcctgtcctttgttgctcatgctgtttaagtgcaggctgagacccagcctctttgtaagtacagtaaaataatccaccgttttttacagaccctagtcaaagggttaaaaaaattaagattgctttccatgtttgaaatttaccattgagagtcaatgaagttgctattttgagtttagcattgatattgtgaaaataagtgcaatttggatttcatgtttcttaatattcattcttgtttcacaaatgaatgattaaggaattatgcatcataaaggaacctaagtgaggtatatgatgagtgtattgtctttgcacacacatataggtatattctgaatacaagcttattcacattttgcttcctaatctttttgttgtacagggattcaggtttcttattcttacaacatgattgtttatatgtgaagcacatcttgctgttgccttatttttgatgcttttattcatgacaagaattgtcaatataagaatgtatatcttttttgcaaccaatttaataaaggagttgaaagaaaaaaaaaaaaaaaaaaaaaaaa

SEQ ID NO: 367 - DNA, 4982 bp, Homo sapiens
agtcagggtcaagtggtgttagcaatcacatcagcaccaaatggctcaggatgctctggtttcaaagcttataaaacagagggtgattcccttgggactcactcagctcggctccgaaaagcaaaggccagaaggcagcagtgagcctgggtccctgctgtgtagggagactcaggggctgggaagaaggatggaatcagaaatgctgaaggtttacgtgagctttgcaccgagcgcctccgaaccactgcctctgggctcaacagaacacagggattaatattaagattggaagtttgtgtcttttgctggatattggaaattgaatgtaatggcaacagaatttataaagagttgctgtggaggatgtttctatggtgaaacagaaaaacacaacttttctgtggaaagagattttaaagcagcagtcccaaatagtcaaaatgctactatctctgtacctccattgacttctgtttctgtaaagcctcagcttggctgtactgaggattatttgctttccaaattaccatctgatggcaaagaagtaccatttgtggtgcccaagtttaagttatcttacattcaacccaggacacaagaaactccttcacatctggaagaacttgaaggatctgccagagcatcttttggagatcgaaaggtagaactttccagttcatcccagcacggacctagctatgatgtgtataacccattctatatgtatcagcacatttcacctgatttgagtcgacgctttcctccccgttcagaagtgacgagactgtatggatcggtttgtgatttaaggacgaacaaacttcccggttcccctgggctaagcaaatctatgtttgatcttacaaactcatctcagcgattcatccagagacatgattcattgtccagtgtacccagtagttcttcttcaaggaaaaattctcaggggagtaacagaagcctggatacaattactctatcaggagatgaaagggactttgggagactgaatgtgaaattgttttataattcttcagtagaacagatctggatcacagttttacagtgcagagatttaagttggccctctagttatggagacactcctactgtttctataaaaggaatacttacattgcccaaaccagtgcatttcaaatcttcagccaaggaaggttccaacgctattgaatttatggaaacgtttgtatttgctattaaacttcaaaatctacaaactgtaagacttgtatttaagattcaaacccagactcccaggaagaaaaccattggagaatgctcaatgtcactcagaacccttagcacacaggaaatggattactctttggatataacaccaccttcaaaaatttctgtttgccatgcagaacttgaattggggacttgttttcaagcagtaaatagcagaattcagttacaaattcttgaggcacggtaccttccaagctcatcaacacctctgactttgagttttttcgtgaaggtgggaatgtttagctcgggagagttgatttataagaaaaagacacgcttactgaaggcctccaatggaagagtcaagtggggagagactatgatttttccacttatacagagtgaaaaagaaattgtttttctcattaagctttacagtcgaagctctgtaagaagaaaacactttgtgggccagatttggataagtgaagacagtaataacattgaagcagtgaaccagtggaaagagacagtaataaatccagaaaaggttgttatcaggtggcacaaattaaatccatcttgaagacttcacacattaatttggtgaagaacttgacattcttttagaagacttatgatttcaatttgctaccaatgagaagaggcaaatcaacaaatttgtcaatttatgggggctataattatggtatataatgtatctgatagaaaatttgataagaaaatgtaatgaattttatcagatatccaaagtaaaggaaatgttttaaaactgcaacaagagacacagacagtaaaatcaaagtattattaggatgactaaataaattataaagtctgtgagaatatcaaccatagatagttctttctatattatgtttttgcttttgtattttaagctttacttagatattcaaaacctggtatatcaagtctctgttagtactattggcatttagaagactttaccattatttcagtgctaggcattattgattaggtcttggctccactgtttacctcttgctatgtattttctcccggtaaaaatgaattgaaccatttcaactattttctatatttggagaaagtttgtgccctgtgttttataatttttttacccataagacatcacattatccctttgtaagctacttatctccaaaaaacttcagaaatagaaaactacattttggcaggaataattgaaaacaccagaaggttgaagtttaattggaaacccagaatatacatactttgctgttttcttccctcaaatattttactatttgttttatttggagttaaaataagagtatcatccatatggtccatcctaattcacagaattaaatgagcttaaatagaaaattcagtattttatgataatcacttcgtttttagtttttaaaatttagattattctataatttaccgtgtttgagtattttctcatttttttcataaccatacctgattatactgtgtaacaaatattttctattgcagttttctttccagtacttattagaactcagtatttggaaataatttcagcttaattgaccataagaactgtggccaaaaagaacagttttttggagaggcagatgacattatacctgattttagaaaatctcactttatttttgctaataagtagactaagtgctctgtgttctcagtcttccctttttttctgcccccattcttactttgtcccaggcatgcagagaaagatggtgatattttaggccaggagtataccttgctataacctaagcatgccttctttattccagctcctatgttctgtgtatatcattaacattttcccaaataaacacttaattctcttttccctaggtgccatctcctcaagctacaaaatgtccacatcttatatcccctttgcttctactgctctgattttgtggtaccagtactctctgccactgaacattttgaaatatttttgttttagatttgcaaaaaatgacatataggtcagtactcacatggatttttaagataaatcacctgtgtgataatattttgaatctgagacgaatacaacttttaaaaattgtttttaaaaatagacttttttttttagagcagttgtaggttaacagaaaaattgagaggaagatagagatttcctttctcccctgacaaagccctcaacagcctcccaggctatcagtatcctgcaccacaatggtacatttgttacaatcaatgaacctactctgaaacatcattatcatccaaagttcatggtttacattagagtcccctcttggtgttatacatgctagaggacaaatatatgatgatatgtatgcatcattataatatagtatagtttcgctgccctaaacatcctctgcaaatgcaactattttaatgggtaccaaagaagtaaatgtatttactggcttttagataataaataacgggctttattgtttattttaaaagctacaatttgttttagctggtttctctgttctattaatgctttgaatttccaaatttaatatatgtagtcatgcatttaacttaatatttaattatttgatttatttaattttctatattcttacaatgtatgtatgatgtataatttaagggaaagctatgacttctcagtttcttagaatcctaggtaaataaaacaataaaaagaaaacccttacatttaaaagagctttcaggtacagaagtattgatacaactaagatcctaaatgttttaattagtgtttacttaagcctttttcaggtgaggaggtactaatgctggttatttccttgaagctttatgtggacctataaataaaaatccaatctcctgctaataggtatgcatattgtgagaaaaacgttaggagctggtagtaaaaaatgagattctatgccaaaataacttctcttcatatttgcctaggcatttcttgacctttacccacttacgcaaggagaaggaaatcataatgatgtcatgtgatcaaaggaaaccatggaagggttcacgctgatagctgatagcttttacagtgctcattcctaacagtggatttacttgtaagctttcagatcaacacaaatagctgcagcctgggttaaaatataacatcactatttggcttttgttttgcatgatttttaaaagcagtactcctagggaaatggcctctgaagtatatcagtttcatctcttaccaagactgttaagaagaaactagtgggattttgaacaagttatataattgtggtctgaaaagaccctaaactgaagttctgtttaaatatagttacatgaatttctctgatactaatgtactcaacagccaggtataaactatatctcctagtaacattttccatttttgtttaatcaaatacttgcttatgaaggatttcagaaatttgtaataaatgtcagcttttgatagcatagcagtaattgacatttcaaaaatatatatttctttctgtgtttggttgggtgtaatgaggaaaatacctgataaaatgtctgaagacactttctaatgttatcttggtgcataagctgtaatttttattcaaaattaaatttcaaatgtttgcagttttggctaaaacattgagttgaaagaattatgaaaagtgggcccatatgaagtaccatgttcattttgaaatatagatttaagatttagaaatatattaaaagagttaatggagcctcctaaa

SEQ ID NO: 368 - DNA, 1779 bp, Homo sapiens
attgccgggccagtgcgggagccggagcggagccggggccggagcgggcggaatggagcccctgcgcgcgcccgcgctgcgccgcctgctgccgccgctgctgctcctgctgctgtcactgcccccccgcgcccgggccaagtacgtgcggggcaacctcagttccaaggaggactgggtgttcctgacaagattttgtttcctctcggattacggccgactggacttccgtttccgctaccctgaggccaagtgctgtcagaacatcctcctctattttgatgacccatcccagtggccagccgtgtacaaggcaggggacaaggactgcctggccaaggagtcagtgatccggccggagaacaaccaggtcatcaacctcaccacccagtatgcctggtccggctgtcaggtggtatcagaggagggaacccgctacctgagctgctccagtggccgcagcttccgctcaggtgatggattgcagctggagtatgagatggtcctcaccaatggcaagtccttctggacacgacacttctccgctgatgagtttgggatcctggagacagatgtgaccttcctcctcatcttcatcctcatcttcttcctctcttgttactttggatatttgctgaaaggtcgtcagttgctccacacaacttataaaatgttcatggccgcagcaggagtagaggtcctgagcctcctatttttctgcatctactggggtcaatatgccaccgatggcattggcaacgagagtgtgaagatcttggccaagctgctcttctcctccagcttcctcatcttcctgctgatgcttatcctcctggggaagggattcacggtgacacggggccgcatcagccacgcgggctccgtgaagttgtctgtctacatgaccctgtacacgctcacccatgtggtgctgctcatctacgaggcggaattctttgacccaggccaggtactgtacacgtatgagtcgccggccggctacgggctcattggactgcaggtggcggcctacgtgtggttctgctatgctgtgcttgtctcactgcgacactttcctgagaagcagcctttttatgtgcccttctttgctgcctataccctctggttctttgcggttcctgtcatggccctgattgccaatttcggcatccccaagtgggcccgggagaagattgtcaatggcatccagctggggatccacttgtacgcccatggcgtgtttctgatcatgacccgcccatcagcggccaacaagaacttcccgtaccacgtgcgcacgtcgcagatcgcttcagccggagtccctggacccggagggagccaatccgctgacaaggccttcccgcagcacgtctatgggaacgtgacgtttatcagcgactcggtgcccaacttcacggagctcttctccatccccccgcccgccacctcccccctgccccgagcggcgccggattctgggctcccgctgttccgtgacctccggccccctggcccccttcgagacctctgaccccgctggactccggaacacccgtggtgaccgccgggaccctgcctgtgactctccaggactctgcgaccccgggatggatattgcgatgctggtctcgaccctgaaaccctccctcggatctgtgacctcggacccgtactccatctgccgcatctccattccgggggccttccctcgggtccctggcagaaagacattttaccccttcttgccaaaataaaaaaggattcgtttttatctat

SEQ ID NO: 369 - DNA, 5397 bp, Homo sapiens
cgcggaggcggatgggcgcggctccctcccccactcaggcctcttcacggggcggggggccgggtcccccagcccccacccgcgccgtgtccagctcctcgcgtgctcgcggcggagccctgagcgcactgggtccgagtcctgcgcgccccctcaccacctcccccgcacctgctcctcctcctcggtcccgcccagcgcgccagcagcccgatccccagtgctgggagaagagagggggcgcaggcggcgacacaaagggtggagcggcgggaccgggacccgggaggctgcgcggcatggacgccgagtaccctgcctttgagcccccgctctgcagcgagctcaagcacctgtgccggcggctgcgggaagcgtaccgcgagctcaaggaggacctcacgcccttcaaggatgaccgctactacaggctggcgcccatgcggctctacacgctctccaagcgccactttgtcctcgtgtttgtcgtcttcttcatctgctttggcctgaccatcttcgttgggatcagaggacctaaagtgatccagacttctgcggctaatttttcactaaataatagcaaaaagctaaagccaattcaaatactttcaaatccactgtctacatacaatcagcaactatggctgacatgtgttgttgagttggatcaatcaaaagaaacttctattaagacaagctttcccatgactgttaaagtcgatggtgtagctcaagatggaaccacgatgtacattcataacaaagttcacaaccggacaaggaccctcacatgtgcagggaaatgtgcggagattattgtggctcaccttggctacctgaactacactcagtatacagtgatagtgggatttgaacacctgaagctccccatcaagggaatgaacttcacatggaagacttataaccctgccttctcccggttggaaatctggttccggtttttctttgtggtgctcaccttcatcgtcacttgcctgtttgcgcattccctccggaaattttccatgagagactggggcatcgagcagaagtggatgtctgttctcctgcctctgctgctactttacaatgatccgttcttccccctctccttcctggtcaacagctggctcccagggatgctggatgacctctttcagtccatgttcctgtgcgccctgctgctcttctggctgtgcgtgtaccacgggattcgtgtccagggagaaagaaagtgtttaactttctatttgcctaaattcttcattgttggactattgtggttggcttctgttacgctaggaatatggcaaacagttaacgaattacatgatccaatgtaccagtatcgagttgataccggaaattttcagggaatgaaggtcttcttcatggtggtggcagcggtgtacattctgtacctcttgttcttgatagtgcgggcgtgttccgagctacgtcacatgccttatgtggatctcaggttgaaatttttgactgcattgactttcgtagtacttgtcattagcatcgccatcctttatttgagatttggggcgcaagtactacaagacaattttgtagcagagctgtcaactcactaccagaattcagccgagttcttatctttctatggcctgttgaacttctatctctacaccttggcctttgtatattctccatcgaagaatgccctctatgagtcccagctgaaagacaatcctgccttctccatgctgaatgactcggatgatgatgtgatttatgggagtgactatgaggaaatgccgctgcagaacggccaggccatccgggccaagtacaaggaggagtcagatagtgactgagccccggccagcccagcgaggcgacaagatgcctggatgctttccccggtgaccgtctgctgaccttcccctgttatattcagatttttcttacaagcagagatttcctgttcatttgtttacatatttttttaaaggaaaaccaaaactgagggtaaatttaaatgtttagccaaatttattgtcatggtggctacgagaagaggcattgataacaagtttcaacagccaaatccttttttacagagatttcagatgagcgtgttttcagtgatgaggaaatttcacgtttttagtacagtgaattatgtacttttttttcctgtaatcattcactgattccaagttcacgggcagcctgtgactaggtcctcagcgtgacagcatcaccctctttcttcccttttccatggtactgttttgtgaccctttaaactcaaagggaagccttatctgtggctgcttcagggcagtccttcctcgttgagtggccagtgccctgggtaaccaggtggctgaagtgattggtcagttatgtggactgcgttttgtgcagtgtgtgagttatgactcatcgggaatgggagatgctggggttccaacccttcacgtcaccaaaggggaagtaatagtgtggagttctgaggagggtttgataagttgaataaggaaaggctaagataatttacaggttaccaactcatgtggggaaggtcttactgccatggtgcttttcaggggcctgtgtgtacacacatgattaaatggatttgcctgtgggaggtatgggcaggagaggaacccttaccattccagtaaatagcagtttctgcaattctgttgaatatgaaatgccatagagctttatttatttatgtaagtaaaagctaaatgaggggccaggtgcagtggctcacatctgtaatctcaacactttgggaggccaaggtgggaggatcacttgagcccaggagtttgagaccagcctgggcaacacagggagaccccgtctctataaaacatttagaaagttggctgggcatgctggggcatgcccatagtcccagctactcaggaggctgaggtgggaggattgcttgagccctggaggtcaaggctgcagtgagccatgattgcaccactgcactccagcctgggtgtcagagcgagaacccgtgtcataaataaataaagctacatgaaagattgatagaatattttagattatttattggccaaaagtttttaaaactcatatttggaagcaaaatgaaaagcaagtaaaatgttttaaatggttcatggaaaacgtatttgggtagaaggcaactcgtgcttccggaaggggttccctgtcctccatgtgtccacatggcggtcaggtagggacgacctgttctgtaaagtccttggcactgctgaatctgtggcatcatagaaggccctggagcttccccgttcctttcagtcagggactccatatagagtctcatgtggacgtctcccgtgctttcctcttgacctctacagtcacacttctgttaacatctggtaactgtgggcaacctgactgatgccgtcttggcaattgaggtccagaagatgatagttccgcaacgcaagcagtacctactttttttcttcatctatgcattgactctcagattaccatgcagagcttcacgttatcatccacgttaagtagtgctaggtaggaccttagagatgttcatgagaaactatttgttatgactttcctttgtatctttccttttaatttaaactttaatgataatgtacttttaatatggattctattcacatttgttttaaaaaccttgtaaatatgaatgtttaagacaacttactgcaagggtaattcaagtttacatgatttttaaatttgcaatgatgttttttttattctgtgtattgaaaaaaattttctgttaccaaattttacaacttctaataagactactataactttatgtaaactgatgaagatgtgctgattaacatattctgtgatatggtttacaacttttaatcataattgtccatgattttggaatgctgttatttatcagtaaatgtaaaatatttgaggcatttagccatacacacactagaactttttaaaactttgtcctatagtgtaattataaactgatgactattatcttcatacattgagtcttcatgcatcaatgaaatgaaaaatataggattatttatttactttttgtaactaagtgggaaataagaaaaaaagttagaaagtacttaaggggaaaatcgttcttactaagtcatgtattttcaacttgtcttccctggtatatcataaataccgacatattacataccccatgtaaaattttgcttaaactctctagcacttggcatgtagaatatgtaccataggtatcaggttaaaacactaaagtctgccagaaacttttgacagtagcaagaaaattgttgaagaaaaaataaattatttactgagggtagttatgttaaagttttgcgaacttaaagggctgactttagttccttcatggtaatggcttgagtaacatcatctttgggattttttaaatactggtccagtctaggagaacctggaagatgaccagaggtatttcagtttccctagggagagcttcgttatccatgtggatgataagtctgcttgatttattattaaatcattatagcagtgaagtggtgccattttctctctcttaagccccatttgaaaggctagagaaggggatatatatactatgttcaaggtttgtaaggttgttaatgtacataattgcagattgcaataaaagcttagatacattttgtaaacccaacccactaaatgagcaggttacaagacaaatgtcaccagcctcaagtattttatgaactatttactgagggtagttatgttaaatagattataatgtggtaaattatttcctgaatcctttatcacaggaaaaacacagaccctcataaaagggataattaaaacggatgtgtctgaacatttagtgaagatgagacttaaaacatgaaagtgtatttgtgtattttgagggttttagaaaccggttgccttagaggttagacttttgaagaaaaaaaaaaaaagatacagatcttttcccctggccaaagggaagttgtattagtctgtgacatcttgtgatgctgtttatcttggtttgacattggagatacgctagtaactgtgataccatactataaaacagaagaattttctgctactaaaaactgcctttttacaaaatgactgtaaatatttgtaaaataaaataacactaaactttaagcccaaaaggagagatagagccatgtgttcagttgtggacctgtccgtggggcacagtgccaccccatcacagtgttgctgtcatcaggcaaaagtgaatgtttgtttatggcaaattcgtcttttgcgaatggcttaattctgacactacctttctgggaaatgttaataaatttttaatattcacttcta

SEQ ID NO: 370 - DNA, 2239 bp, Homo sapiens
gtgacgtcaggagcagaggccggagctgtccatcagcaccaaaggccgcgggcgggctcagggcatggggccgcggttctggggcggcccgagccccggctcctgcgccttccccttcctcaggcccagcccgagttcccggacgccgcgggactggagtgccagccggtgttggacgtggagcggcgccgccaccgcgccgacaccattctctccggcccagcagcccccttcctcgcacgacggactttccctggaccccagtcagttggagcctctggcgccccgcaaccccggcccctcgggcctctgcacagcctctttcactcagaagctcaggtcgcctccagcccaggttaacttgggagggtgactcccttctattcccagcactatgccggggactgtggcaacactgcggttccagctgctgccccctgagccagatgatgccttctggggtgcaccttgtgaacagcccctggagcgcaggtaccaggcactgccggccctcgtctgcatcatgtgctgtttgtttggagtcgtctactgcttcttcggttaccgctgcttcaaggcagtgctcttcctcactgggttgctgtttggctcggtggtcatcttcctcctctgctaccgagagcgggtgctagagacacagctgagtgctggggcgagcgcgggcatcgctctgggcatcgggctgctctgcgggctggtggccatgctagtgcgcagcgtgggcctcttcctggtggggctgctgctcggcctgctgctcgcagctgctgccctgctgggctccgcaccctactaccagccaggctccgtgtggggtccactggggctgttgctggggggcggcctgctctgtgccctgctcactctgcgctggccccgcccactcaccaccctggccaccgccgtgactggtgctgcgctgatcgccactgccgctgactacttcgccgagctgctactgctggggcgctacgtggtggagcgactccgggctgctcctgtgcccccactctgctggcgaagctgggccctgctggcactctggcccctgctcagcctgatgggcgttctggtgcagtggagggtgacagctgagggggactcccacacggaagtggtcatcagccggcagcgccgacgcgtgcaactgatgcggattcggcagcaggaagatcgcaaggagaaaaggcggaaaaagagacctcctcgggctcccctcagaggtccccgggctcctcccaggcctgggccaccagatcctgcttatcggcgcaggccagtgcccatcaaacgcttcaatggagacgtcctctccccgagctatatccagagcttccgagaccggcagaccgggagctccctgagctccttcatggcctcacccacagatgcggactatgagtatgggtcccggggacctctgacagcctgctcaggccccccagtgcgggtatagccatatctgtctgtctagactctgcagtcaccagctctgccagctcgaggaggcctgctaggctgccactcagcctcctggctttggctgtccctctccccagcctggagagggctggcctggtcactagaagggaggattgtctcaggcgagtcttggcctgagaggaaagccccctcccaagctcccaagaggctcctgaggaactcggggtgtgaaccccattggggtgtgctcagggttgtgagtgtgttgcccgtgtgtctgtgtgtatgtgtgtgggggtgggcaggcttggaggggacgctgggacccttgccttagatttctgactggtagggtttctccaggctcagccccacctcttcactccctgccaaggtcccatgggccacctcctgcatgtctccgcggaggggctaccttccttcccatcgccctgcctcgcagccagactcatctaagggttcttgtccttgtctatggggcaaactgtagcatccctcaccctggtcccctggcctctgtaaagccaccagcctgagggcagtggcaggagatgggggtgggggggtgctgctctgggctgggttgggaagggagttggggaggggtttaaatgcacggtgcatgtctggtgtctgtcatgccaacctagacacctcatgcttctgtctcccccaccccactctgttttacatcttttataaatgtgccaaactgtgtggcctctgccaggaaaaaaaaaaaaaaaaaaaaaaa

SEQ ID NO: 371 - DNA, 2551 bp, Homo sapiens
cggccgcccacctgccgggtaagggcccctcgggcccgtggtcgggcatcgattggccccgcctggcgcagcccccgcccctgcagcggactgcggtgctcatcagacctgagcagttgctccggcggcgctcggggagggagccagcagcctagggcctaggcccgggccaccatggcgctgcctccaggcccagccgccctccggcacacactgctgctcctgccagcccttctgagctcaggttggggggagttggagccacaaatagatggtcagacctgggctgagcgggcacttcgggagaatgaacgccacgccttcacctgccgggtggcaggggggcctggcacccccagattggcctggtatctggatggacagctgcaggaggccagcacctcaagactgctgagcgtgggaggggaggccttctctggaggcaccagcaccttcactgtcactgcccatcgggcccagcatgagctcaactgctctctgcaggaccccagaagtggccgatcagccaacgcctctgtcatccttaatgtgcaattcaagccagagattgcccaagtcggcgccaagtaccaggaagctcagggcccaggcctcctggttgtcctgtttgccctggtgcgtgccaacccgccggccaatgtcacctggatcgaccaggatgggccagtgactgtcaacacctctgacttcctggtgctggatgcgcagaactacccctggctcaccaaccacacggtgcagctgcagctccgcagcctggcacacaacctctcggtggtggccaccaatgacgtgggtgtcaccagtgcgtcgcttccagccccagggcttctggctacccgggtggaagtgccactgctgggcattgttgtggctgctgggcttgcactgggcaccctcgtggggttcagcaccttggtggcctgcctggtctgcagaaaagagaagaaaaccaaaggcccctcccggcacccatctctgatatcaagtgactccaacaacctaaaactcaacaacgtgcgcctgccacgggagaacatgtccctcccgtccaaccttcagctcaatgacctcactccagattccagagcagtgaaaccagcagaccggcagatggctcagaacaacagccggccagagcttctggacccggagcccggcggcctcctcaccagccaaggtttcatccgcctcccagtgctgggctatatctatcgagtgtccagcgtgagcagtgatgagatctggctctgagccgagggcgagacaggagtattctcttggcctctggacaccctcccgttcctccaaggcatcctctacctagctaggtcaccaacgtgaagaagttatgccactgccacttttgcttgccctcctggctggggtgccctccatgtcatgcacgtgatgcatttcactgggctgtaacccgcaggggcacaggtatctttggcaaggctaccagttggacgtaagcccctcatgctgactcagggtgggccctgcatgtgatgactgggcccttccagagggagctctttggccaggggtgttcagatgtcatccagcatccaagtgtggcatggcctgctgtataccccaccccagtactccacagcaccttgtacagtaggcatgggggcgtgcctgtgtgggggacagggagggccctgcatggattttcctccttcctatgctatgtagccttgttccctcaggtaaaatttaggaccctgctagctgtgcagaacccaattgccctttgcacagaaaccaacccctgacccagcggtaccggccaagcacaaacgtcctttttgctgcacacgtctctgcccttcacttcttctcttctgtccccacctcctcttgggaattctaggttacacgttggaccttctctactacttcactgggcactagacttttctattggcctgtgccatcgcccagtattagcacaagttagggaggaagaggcaggcgatgagtctagtagcacccaggacggcttgtagctatgcatcattttcctacggcgttagcactttaagcacatcccctaggggagggggtgagtgaggggcccagagccctctttgtggcttccccacgtttggccttctgggattcactgtgagtgtcctgagctctcggggttgatggtttttctctcagcatgtctcctccaccacgggaccccagccctgaccaacccatggttgcctcatcagcaggaaggtgcccttcctggaggatggtcgccacaggcacataattcaacagtgtggaagctttaggggaacatggagaaagaaggagaccacataccccaaagtgacctaagaacactttaaaaagcaacatgtaaatgattggaaattaatatagtacagaatatatttttcccttgttgagatcttcttttgtaatgtttttcatgttactgcctagggcggtgctgagcacacagcaagtttaataaacttgactgaattcatttacaaaaaaaaaaaaaaaaaaaaaa

SEQ ID NO: 372 - DNA, 3023 bp, Homo sapiens
gacgactgtctgagagaggggccgctacgccgcacagcaaacaagctccgcgacgtttccaggacccggataatcccgcccttagagcagagccggaagaaggcgggacgaaccggaagagggtgaaatgctttcggtaggcactccacggctgtgaagatggcggcggctgcgtggcttcaggtgttgcctgtcattcttctgcttctgggagctcacccgtcaccactgtcgtttttcagtgcgggaccggcaaccgtagctgctgccgaccggtccaaatggcacattccgataccgtcggggaaaaattattttagttttggaaagatcctcttcagaaataccactatcttcctgaagtttgatggagaaccttgtgacctgtctttgaatataacctggtatctgaaaagcgctgattgttacaatgaaatctataacttcaaggcagaagaagtagagttgtatttggaaaaacttaaggaaaaaagaggcttgtctgggaaatatcaaacatcatcaaaattgttccagaactgcagtgaactctttaaaacacagaccttttctggagattttatgcatcgactgcctcttttaggagaaaaacaggaggctaaggagaatggaacaaaccttacctttattggagacaaaaccgcaatgcatgaaccattgcaaacttggcaagatgcaccatacatttttattgtacatattggcatttcatcctcaaaggaatcatcaaaagaaaattcactgagtaatctttttaccatgactgttgaagtgaagggtccctatgaatacctcacacttgaagactatcccttgatgatttttttcatggtgatgtgtattgtatatgtcctgtttggtgttctgtggctggcatggtctgcctgctactggagagatctcctgagaattcagttttggattggtgctgtcatcttcctgggaatgcttgagaaagctgtcttctatgcggaatttcagaatatccgatacaaaggagaatctgtccagggtgctttgatccttgcagagctgctttcagcagtgaaacgctcactggctcgaaccctggtcatcatagtcagtctgggatatggcatcgtcaagccacgccttggagtcactcttcataaggttgtagtagcaggagccctctatcttttgttctctggcatggaaggggtcctcagagttactggggcccagactgatcttgcttccttggcctttatccccttggctttcctagacactgccttgtgctggtggatatttattagcctgactcaaacaatgaagctattaaaacttcggaggaacattgtaaaactctctttgtatcggcatttcaccaacacgcttattttggcagtggcagcatccattgtgtttatcatctggacaaccatgaagttcagaatagtgacatgtcagtcggactggcgggagctgtgggtagacgatgccatctggcgcttgctgttctccatgatcctctttgtcatcatggttctctggcgaccatctgcaaacaaccagaggtttgccttttcaccattgtctgaggaagaggaggaggatgaacaaaaggagcctatgctgaaagaaagctttgaaggaatgaaaatgagaagtaccaaacaagaacccaatggaaatagtaaagttaacaaagcacaggaagatgatttgaagtgggtagaagagaatgttccttcttctgtgacagatgtagcacttccagcccttctggattcagatgaggaacgaatgatcacacactttgaaaggtccaaaatggagtaaggaatgggaagatttgcagttaaagatggctaccatcagggaagagatcagcatctgtgtcagtcttctgtacggctccatgggattaaaggaagcaatgacatcctgatctgttccttgatctttgggcattggagttggcgagaggtgtcagaacaaagagaacatcttactgaaaacaagttcataagatgagaaaaatctacgagcttcttatttacaacactgctgccccctttcctcccagactctgacatggatgttcatgcaacttaagtgtgttgttcctgaactttctgtaatgtttcattttttaaatctgacaaactaaaaagtttaacgtcttctaaaagattgtcatcaacaccataatatgtaatctccaggagcaactgcctgtaatttttatttatttagggagttacataggtgatgggggaaattgttaactacctttcattttcctgggaagtcaaggttacatcttgcagaggttgttttgagaaaaaagggcccttctgagttaaggagccatagttctatcaatgatcaaaagaaaaaaaaaaaaagagaaactgttacagtatgattcagatcatttaaaaaagcaaaatcaagtgcaattttgtttacaaatggtgtatattaaagatttttctatttcagatgtactttaaagagaaatattagcttaactcttttgacatctgctattgtgacacatcccattgctggcaatgtggtgcacactccgaaacttttaactactgttttgtaagcctccaagggtggcattgcagggtccttaggcaatgttttgtttgcctttatgcagagaggtgctccaagtgctgtgattgagcaccgtgctagaggaactgtaatgcttcagaagttgtagcttatacaaaggaaacaggtcctgctggcttaatttaaacagttattgcatgaagtagcgtggaggccctggactgctgctcgttctttaggatggactgttctggtatctggtattggtttagagactgttaataagggacatcacaaggtgatgggattcatttgaagcactctatttctgttttaatggttttatccaattttgccttcccaagatttttgttctacataaaaagttcatgccactttttaatataaaaaaatttaacaaaattaaaaaaaaaaaaaaaaaa

SEQ ID NO: 373 - DNA, 1006 bp, Homo sapiens
gattgcttgaggagagaagtatgtgatcagaaagcattctttgtctattaactcctgcccagcaaaagtgaaagaaaattcatgggagcatgcaagaacaaagagcacagcaaagctggacaaacacagcaatccaggcaggggatttccaactcaactctggtatataagctgcatgcaaagtcctttttctgtctctggtttctggccccttgtctgcagagatggctcccaatgcttcctgcctctgtgtgcatgtccgttccgaggaatgggatttaatgacctttgatgccaacccatatgacagcgtgaaaaaaatcaaagaacatgtccggtctaagaccaaggttcctgtgcaggaccaggttcttttgctgggctccaagatcttaaagccacggagaagcctctcatcttatggcattgacaaagagaagaccatccaccttaccctgaaagtggtgaagcccagtgatgaggagctgcccttgtttcttgtggagtcaggtgatgaggcaaagaggcacctcctccaggtgcgaaggtccagctcagtggcacaagtgaaagcaatgatcgagactaagacgggtataatccctgagacccagattgtgacttgcaatggaaagagactggaagatgggaagatgatggcagattacggcatcagaaagggcaacttactcttcctggcatgttattgtattggagggtgaccaccctgggcatggggtgttggcaggggtcaaaaagcttatttcttttaatctcttactcaacgaacacatcttctgatgatttcccaaaattaatgagaatgagatgagtagagtaagatttgggtgggatgggtaggatgaagtatattgcccaactctatgtttctttgattctaacacaattaattaagtgacatgatttttactaatgtattactgagactagtaaataaatttttaaggcaaaatagagcattcaaagccaaaaaaaaaaaaaaaaa

SEQ ID NO: 374 - DNA, 2173 bp, Homo sapiens
atctttccgtcccgggcagccagcgccagtcggagccagcgcgagccgccgccgccatcactgccgctgccaagtcctccacccgctgcccccgccatgtctgctaccgctgccacggccccccctgctgccccggctggggagggtggtccccctgcaccccctccaaacctcaccagtaacaggagactgcagcagacccaggcccaggtggatgaggtggtggacatcatgagggtgaacgtggacaaggtcctggagcgagaccagaagctgtcggagctggacgaccgtgcagatgcactccaggcgggggcctcccagtttgaaacaagcgcagccaagctcaagcgcaaatactggtggaaaaacctcaagatgatgatcatcttgggagtgatttgcgccatcatcctcatcatcatcatagtttacttcagcacttaaatccccgaggagtctgccctgcctagagaagggcctctcccccaaccctcagccgttcctccacctctcagccatatctttcagcccccactcccctggatccgtgtgtgtgtgtgtccgtgtgtgtgtccccctgtaaatagccagctgttatttatacatatataatattatatatatttggtctgtttgtagttttattactagatgatttttccggttgtccttaacaccccttcctgaggttcccttcacccctctctcttgccttccttccctttccctttcttcctgactagccccaagtcccttcatttgcatctgctatgcaatagtccctctcctttccttcttcttccctcagatttagctgatccttcctcccaccctggccttcctttcctctttcctcctcactctccccgtcatgctccctctgccccgccctcaaaaaaaaaaaaaaaaaaaaaaaaacaacagcacctgtccaggcttccttaggtacatcttctttgtatccattgggaggctctgagactggccccacttggtcctaagaatcccaaggtctttgggagcgtccagcatgttaattagcgtatcattacatactgctatccctttccatttctttttgttccatcactcttctctcaacctgtgtttctttttttactgaggagttagtccccattagttcttgtatcacattttcatttgcacgacattactcgcaggtggtggggagcctgggcttttggggaaccaggctgctctggtccccagcattgcctcctcctagcccctctagtccagtttgcctcccttaccctcattttccaaacctcttgtaccctcctctccctcccccagctggtatgtaagtgtcttgaagttcagtatgttatgatggaccaataattctgccacttcgggtttctccctacattcctgctccccagttttcatgtggggtactcaactgacattcccatggggtttccctcccatctgcctgatccacctcctcctcccaccaggagagttgggggttggccacaattgatctcttgtgagaggggtggctaccagtgtgtgtgtgggggtcatcactgccttggggaggagtggggcagggcagagaatccccccaattcctgcctgaaatctctggcctcacccctgctgggggttggactgaaaaccctcctccccaatttggggggtgttgccccatcactgcccagctcctctgactgccccccctgaatttagggtgggggtactagtcactgccaatgtgtgtatgggacttgctggaaaacggggatgcttgcccctctccaggactattgagcccagagagagctgtcctctcattgggtgaactgattgaggaagggtctattgtctttttaaatggcacaattttaagggtttgagggtacagtcccttaacctgccacgggagggggcccccaaactttcttccccccacacttctggttttctgtgtggagggggagcagggatatctaagctgtggtgtgaaagggtaggagagatgctggaggtgggggtgctgtgttttagaccccccatattatcccagtgtcccctgcccccctcttcccccaccccatgcccccaattctgtggcgcatccagattgtgaaaatgtacaataaatgtgtaatgagtaaccaggaaaaaaaaaaaaaaaaaa

SEQ ID NO: 375 - DNA, 1939 bp, Homo sapiens
accggcgacccggcccgtggagccggcgcgggcgggctgctgaggtggctgtcgccggctccgagctgcggcttcccgggccgagcccccgatggaggccgaggccgcggacgctcccccgggcggggttgagtcggcgctcagctgcttctctttcaaccaggactgcacatccctagcaactggaactaaagccgggtataagctgttttctctgagttctgtggagcagctggatcaagtccacggaagcaatgaaatcccggacgtctacatcgtggagcgcctcttctccagcagcctggtggtggtagtcagtcacacaaaaccacggcagatgaacgtgtatcacttcaagaaaggcacagagatctgtaattacagctactccagcaacatcttgtccataaggctgaaccggcaaaggctgctggtttgcctagaagagtccatttatattcacaacattaaagacatgaagctgttgaagaccctcctggatattcctgcaaacccaacaggtctatgtgctctctctatcaaccattccaattcttacctggcctatcctggaagcctgacttcaggggagattgtgctttatgatggaaactccctgaaaacagtctgcactattgctgcccatgagggaacactagctgccatcaccttcaatgcctcaggctccaaactagcaagtgcgtctgaaaaaggcacagtcatccgggtgttctctgtccctgatgggcaaaagctctatgagttccggagagggatgaaaaggtatgtgacaatcagctctctagtgttcagtatggattcacaattcctctgcgcctccagtaacaccgagacggtacacatcttcaagctggaacaggtcaccaacagtcgaccagaagagccttcgacctggagtggctacatgggaaagatgtttatggctgctaccaactacctccctacccaggtgtcagacatgatgcatcaggacagggcttttgccactgcacgcttgaacttctccggacagaggaacatctgtaccctctcaacgatccagaagttgccacggctgctagttgcgtcatccagtggacacctttatatgtacaatttggatcctcaggatggaggagagtgtgtcttaatcaaaacccacagcttgcttggctcaggaacaacagaagagaataaagaaaatgacctcagaccttccttacctcagtcttatgcagcgaccgtagccagaccaagtgcatcttcagcctccacggtgccaggttattctgaggacggcggggcgctgcgaggagaagttattcctgaacatgagtttgcgacgggaccagtgtgtcttgatgatgagaatgagtttcctcctataatcttgtgccgtggaaatcagaagggcaaaacgaagcagtcatgatgagaagcacacctcagaaatcaggacatcccccctatcaggtggttttggagaaaacaaggaaggcggaagaatggagtgcaattgtgtgagcagaaaggggggcaggaatcccgggtgctccactgcttaaaccacaggacctggttaactcctcaccaagcttcccacgaccctggttgccaatgggcgcgggagacattgtatacacatcatgctatttaaaatacgttcaaactatagtgtaaatgctaattaaccatattggtatataaccggaattttatattaaaaggggcctcctttttaaatatatgccgtgtaaaaaatgtacttataggaacatctctttgaattgtatttcttgtatattacatacttagagagagactcttttagccaggcaaagtcttttttggctgtggctggaataaatcatttattacttgggagtcccattttggacactaataataaaatcatggcaatgcaaaaaaaaaaaaaaaa

SEQ ID NO: 376 - DNA, 3442 bp, Homo sapiens
ctcaacaaagatggcgcggacgacctaagtcgcgtcacgctaccggcgcgtcacgcgaccttgccgcaatgctcctcccgcgcagctcttatccccgtagactgcggccgagacggggagggggaagcctcgcctggggggcggcagtggcctgggcggctctccggctgctgttgtatggctgcacgttggcgctaccggacgggatgctgtatccccgagagagcccgtcgtggcagcgcaagcagctggacggcctctgaagcttccgcgccgacttctccgacaaccgacgccggggcttcgaggagcagaggtaccggcgaccgctgtcggaggcgcggactcggggcagggccaggagtcgcccggaagcccggcggtgggaatgggtcaggccccaccgtggacatgccggttccctccagcttcaacgacatcggccagggctggcggctgcggcattttgtcagctggttgtggtatgaacgggaggtgaccctgctggagcgatggatccaggacctgtgcacaagagtggtgctgaggattggcagtgcccacttctatgccatcgtggtatcccaagggttactttgtccagaacacagactttgacttcttcagctacgcaggactgctgtggtctctgcttctatacacgacaccccccacctacatcgatgacgtcaccgtcaccaccggcgtgaagcgagacagtggtgagggcttctggactggatggaggacctgaagacgtgaggtggaggcacaggtagaagagaagattctcaccatcgctgattcacacaaaagcatttctccaagtggttgcagatgacatgatttcccaaagtgttagagctgaagtgtgtttccttgtgtatatatactgtggttcctttatcccttcatctgtggatagacaggtgcaaccgtgtggttccccacgatatgatttcattgtggttttctgtctgaagagtatcccagtatgtacctgtggagcagcttctttatcccttcatctgtggataagcaggtcatgtcctccaggtttctgcacgttgctgcagatgacatgatttcatgaatttctgcggccgaagaggattccactgcgtgctgcagtttctttatccctttatctgtgcatgaacagtgcaggccaaggccccctgcccatggaggtgtgctgcagacagcagcagcagcagcagcagcagcagcagcagcagcagaggcctggcttcctgaggaattgctggccggtttgaggaaggaaggaagtcccacctaccatgatcaccctccagcctggaggaagctccatgccagcagcatggaccagcatgggagccagagccctgctaatgctgcagctcatcacccctgctcagcagcccagcagcccagcagccattgccacatcccatttccagggcctcctgcccccatgcccccacgtgcccatggaccgacacaccactcttcctgttggcccaaggtaggcatggagggaatttttcaagtccacttttagtaggtaagtcaaaaccaaacaaaataaccactcgacacctggtccaatgcccttccaaactcactcttttctctgacccttaaacacttgtcctgcatctcccagactccactgtaccttgatcagtaggtccctcttcactgcagtgtcttttttgcagagttcttttagctctttcatgcttttgctatgggcagaggaaagaaagaagggtaaatttgggaatcaggggagatttgtgagttccagtcccttttgtttgaaaacccagtgaatcccagcttactgggtgagagttttcagtggagtcctctgatcacaggggctccagaggaccagggtgggacctctcatgctcctcccctgggccccatctccacttcacatgagccactgcgtgtttacagttagctttcagctggacacagagttccactgctgggtacaaacacctgaaagcctccagttggctccagtctgttcctgatggttaaaaaaccttagtcctgagttggaaatccttgcctaggagtccagggcagcttagtgaccacagccaccggcccatccctgcctccagtgtccctggactccaagaacctttcagagtcattgagggcacatggggggagacctgtgagtccctaggtcaaccctgatgctgccatggagagagccctcctcacctggacactcctgcccacgtcttgtgtagctgacctattgggttgctgcacagagcagagacgatgacgtgcaccgaggagaagttgttgaggcttaggcactcctggagagggaagaatgagctgtgcggttcagagttggagcttggcccactacagcctcagccccctctgctgagatctcccctcctggatgaagcagaggcctggggagcctcaggagggcagacctggggccgagtggatgtcactcatctaggaggattttagttcaacccaaggaagaccccaggtcggaagtgagcagccaccactgggccgtgggagtcaagtctggagaaacagctacggccatcccagccctggccaaggggaaaatgccggaagactccagggtgggaggaagcgcgtcccaaggcccaggatctgcgaggcgacttggggaaaacgcaggacctgctgaagctcacacccgtggaccacccagactgcctgccgctacaggatgccctccgcatctcccaggacttctttccggcatcagtgtggacattgaccccactggactgcagtcacagtggactcccaaggggcaggatccacctctgatgttcagtgaagactaccagaaaagtctgctagagcagtaccatctgggtctggatcaaaaactcagaaaatacgtggttggagagctcatctggaattttgccgatttcatgactaaccagtgtcagcccaagactaccccgtcggtcattctgttcctgccgtcctgtgaggagccccaagccaacaaggccacactggtgtgtctcatgaataactttatccgggaatcttgatggtgacctggaaggcagatggtaccctcatcacccagagcgtggagaagaccacgccctccaaacagagcaacaacaagtacgtggccagcagctacctgagcctgacgcccgagcagtggaggtcccgcagaagctacagctgccaggttatgcaagaagggagcaccgtggagaagtcagtggcccctgcagaatgttcataggttccagcccccaccccacccacaggggcctggagctgcaggatcccaggggaggggtctctctctgcatcccaagccattcagcccttctcgctgtacccagtaaaccctcaataaatatctttgtcagccagaaaaaaaaaaaaaaaaaaaaaaaaaaaa

SEQ ID NO: 377 - DNA, 4205 bp, Homo sapiens
acccaccgaaccccgcccgcgccgggagcatctcgcgtccccaacgggcccccgggtcggtttccgcggtggccatgactgcggccgtgttcttcggctgcgccttcattgccttcgggcctgcgctcgccctttatgtcttcaccatcgccaccgagccgttgcgtatcatcttcctcatcgccggagctttcttctggttggtgtctctactgatttcgtcccttgtttggttcatggcaagagtcattattgacaacaaagatggaccaacacagaaatatctgctgatctttggagcgtttgtctctgtctatatccaagaaatgttccgatttgcatattataaactcttaaaaaaagccagtgaaggtttgaagagtataaacccaggtgagacagcaccctctatgcgactgctggcctatgtttctggcttgggctttggaatcatgagtggagtattttcctttgtgaataccctatctgactccttggggccaggcacagtgggcattcatggagattctcctcaattcttcctttattcagctttcatgacgctggtcattatcttgctgcatgtattctggggcattgtattttttgatggctgtgagaagaaaaagtggggcatcctccttatcgttctcctgacccacctgctggtgtcagcccagaccttcataagttcttattatggaataaacctggcgtcagcatttataatcctggtgctcatgggcacctgggcattcttagctgcgggaggcagctgccgaagcctgaaactctgcctgctctgccaagacaagaactttcttctttacaaccagcgctccagataacctcagggaaccagcacttcccaaaccgcagactacatctttagaggaagcacaactgtgcctttttctgaaaatccctttttctggtggaattgagaaagaaataaaactatgcagatatgcgttccattcacttggctttcacacaactgctctccgaaaggggtgctcagtggtgtgcgtcctggctgcacgagaatcacctgggacagtgtaaagccgactgattctgggctccaccttccagagctaattggcctgggcacgtggtgagttttaaaagcttcccaggtgattctgatgtgcagccatgttgagacccactggtttggtatccaaataggagcttcctgagaacaccttaagtggatgagaatctggtctttagctgtctcctaactcaactcgtgctgagcaagtaagtatctgaatgtcaaatcctggttatcttttatcttcctaagttctgaagtcacaaaaggctaaagggctatcacccctgctcactgtttgcgtgtacttcaccatcttaggagaacacggtaggttgggcttctaaatgcaataataaattacgctgactgtggtaacttagccaaagtaagatactgattaagccgtatttttctgaagtgcttccattccaggttttgctttctgaggcattacattgtttttgagtatagattacattttattaactaaaaatgattgttttgtgacttccttgggaaggtattttaaaatcaggaatttttatgcaatgtctataagcctgtttaaagctttccatgggctctgccccaaggccgttggctgcagcgttcaccatctgagtgccagttgctggactagttgaggtgaagtgcattgttttctctctgagcagctgtgcggggagctgagtgatgtgccctgggacaggcttcactggagctggtggaagtataaccagaagcacaaggaaatgagccaaaagggtgtcattgacacttttcatttgctcctgtgatactaacaacactttcacccaaatggcttaatgtaatattggaaatagatcttaaactgccaaatctcacactattgcataatccatatgctctttagatctagtcagtgtctctgggttttggtagcagatacagcgttccctttacaggaatacccaaggtgttctttcagcttccagacaggtcctttgatttcctttataaagggaaaattctggcaaatcgtgcctttactattagaaattgttcccagttgatgtcttttggggagctggtggcatgaaatgcaaatgacctatacattaaagtgatgtctcagtgaataccatacatgcagtagaacattcagaagagaggagcagcaatcctgaggggctgggggagtgacagtggcaggacggatgggcgggtttgacagattgtggtgggaagaagaatgatcatgtttaaagctaacatagccagtgttttgggctagccacacatcattccagagaccaaaaccttactcatgaactagacctttatcgatatcagtgaacccccatgtttaaaatattagaatgtttagagataaaatagagataatagagataaaagaagaggagggcttctatcaatgctgtaaacagtctgataagcgactgtggttattcccctaaagtttacttcagcactaacactagtgcttccgctggagtttgcagttttccagctttatacaggattttcctttgactggaagagtcaaggatatagagactcaacagtgacatttattgtacaacatcaaggggaataggatactcatcaaactgggattattcttatcaaaacatggtcttctttgaataagaaaaatacatagttggttattatggacttaaaactgtgttaaatggatattctgataaaatatttgctgctctgtagagtgtggaaagtctgagaatattagctttactcatcttgagctttgaggatgttctctgtacgccgatggtttcatattaactaaaaaagctgggtattgtaaaatctcatttataaaaactcagatgagaagaaaattttctttgatggtgagactgttgtcttagttcaggaaattatttaataatcctttgttacctgtgaatgaaggaactttgtaattctgatttatcgtaaaacatgagcctttccagagtcagcttagacactgttgtcgcaaatagccatgctttgccttatgccaaggaggcccagagggagggcctagtcttcctctgttgctgtacatatattgaaatgcttttttttttttattttgcatttgttatctataatgagctttctgagccctgatattatgtgagacaaacaggagttattgatgttatacactcccttccattcaggattttctgcttggagggaaatatgttgaccttagagaattgtgaatattgttgcaattcttgaatatattaccatgtgaataatagagactgtgttgctctctagtataagctatatttatttttgattcatttgaattactagttataactggagaaattttgttacctctatcctggcttgcctgactggctgtataatagcagcagcctcttttagagcatcttaatgaaaacatggatgaaaggaattaatgatgatatctgcagactgcgtagaaaatggcttttgttcccagcgttaacattttcttctcaatcacatttcaatgtttgtggagagtggcagattcacaccagaaacactaggtgttcatatccatagcatggatgcagaataagcagttgggagagaagcttcttcctacctggtactcctcccattcacctcagcccagccccagacaggcgttagcattcagtgtgggccctcaggcagccctgaagcctggctgggtcatcagatgggggcagcctgtgacgggcaccagcggcctgattccagggaagagttcctggagggtgttggctgtttttgttagctcagtttttttctgggctccaccattcctaactccaggtagacaagatagatgtcacacacaacaattttaaagtattttgcttagtgcattttgtttatgattgcagtgtttgtttcttatttaataggctttttacttcattctattaaattttagtgtttagaagaggcgggtactgtcactgtgtaaaatatgtaatattttatatgttataccatgtcatatatacttgcaatatcagaccttgcattcaatatacaatgcaattgactctttgcagacctgcatttttcagtgaacaataaaaagattgtctggcactcctcaaaaaaaaaaaaa

SEQ ID NO: 378 - DNA, 3102 bp, Homo sapiens
agcttactttgagggttcatgatgttcagagatgctcaggggacttctccgctgcaggaggtggggtgaggacattggattcatttcctcaaaatgtggagagaaaggagaaaaatcagaattctatttgtacctctgcttcctgtgctgtttatctttgcttgtctttatctttttccacctcaggggtttcatcaggggtatttgggagagtctaggggtggggatgaagaattgactgggagctgaggaggggggatttttatgctgaagacctggcaggaggcaactcctgacacccccacagggttagactgtaaaacctcttccatgacttgctgactctataggataatagcaacaggaaaagaactgagggacgtgcagatgaggatgaatagggccccaacaccagtgcctgaggctgaggttagaactgactacaaagacacaggaaaccaagggcccagtctcccctccacgctgaaatacgcaccctcttgtctgggtcatgtctactatgtgaatacttgaccatggaggtctggggctctggtggcttccatagctggctagtctcttgatggagagaaatcagggcttctctcatccatgctggaatttcatttagatgtcaacttccaagtttccctttttccagatgggattatagtcctgcttctggaacagggtagctgtgtgtggtccaggatagttcaattatctggccctttgttcacttcttacaatcattgatacagtcaacaaaaattggttaaaaacaatatatgccagacatatatccctgagttctgggacaataaccaaaattgaataaggcaatatcctactctcaagcaatagagggtaggaatagaataataataatataatacaatagctctatagcagtatgtaaactataaaagcattattttacgtgtttctattgaactgtcataactaaataagatggttagtactataattatcccaaggattcattcactcatagaacatttgttgagcaattactacctgccagtcacttccaagtggtaagtgagatagaaatggttctttgtggcgctcacaatttattggagaatggaaacacaattacaaaaaaaaagtgtgataagttctgggagaagggtggtacaggatcctgtggggtagtggtggctccatataggagggacattgggatactgatcaggaaggagtgggggacagggctagaagctgcattagtataaagttatgtcagactgccaaaacaaaacaaacacaaaaaatcagtagtctgtggtaaagaattgctataggaacagccagtaggggcagttaagctggtcttggtgaatcaggggaagcgtcctagaggaacagatgtccatgctgaggccaaatgctggacaggagttagccagacagggaaattgcattctgggcagaggagacagcaaaggtcaagaaacatgacaactttggaagactgtaacttgttcagaggcagagggtgcaaaggagaaatgaggaaaggtgaagctggagaggtgggcttggtccagctcttgctgggccttttcagccgtgttaaagatttagactgtatccagagggatgttgaactttaagcctaagactgaaaaggtgagaattgtgccttagatcactatggttgcagtgtggagactggtttggaaaggggagaaatcagaggcttttacagccatcccagggagagagaatgaacaccagaattagggtaatggaagatggaaagaagagaaatcgttttatgggttgctcaggagatagaattgacatgtcttgggattgttttgctgtgtaggggagagagacaagtcaagagtatacatcctgtttctgacttggcaactgggtgggtcatgggtctgtttcctgagacagttgtctacagccataccaccgtaagcgccctaaatctcatcagagacagtttatgcaaatggagcttggggaaagagaggtcgtggctggagacagagatttgggcatcatcaacatataggtgtggggagcagagaaggctgaggaagaaagcaggaaacatataaaaaggagagcagggaaaggagccagtgagacaggaaaaacctagtaacgtggtgtgatgaagctaggggaggaaggaaggaaggaagggcggcgtggaacgctgctgatgggtggtggcggggaaaatgaacgagtatccaccagcaacgagaggggcctccatggtcttggtgggagcatttctttggagaggtggaatcagaagccccagatgtcagagggttaaggaataatttggaggaaaagcgtaaaggcagtggaggtgaggagagaattttcaaaatgtttggcagtgattgcaatgaaagaaaaaaatggagggagcagagtatatgcagttgaggaacttttttagtttggagtgtgttaacacgatgttaggaagaaggatcaagtgaaggagaaaggtgaaaatgctggaaggtggggcttagtgatgaaacaaaccttggggacaggtgggcgtggtactgagagtcccagtgaggggagtgccctcaggcaggcgccggtggcttctgtcacaggagggaacagcgctgacattcagctggttcgcactgatacggctcaaccagtttgttaaaacatgtctgttccagtgtcagtaatatacgagtaactgcaatatgcagtaaaaattataaattctaatacaaactcagttcaagctaattaagagatcgcaacagccgttggtaaatggacttcccgctgcatttgagaagctttgcagcgccatctgccggtgtcgtagcatcactgcaggctgagaggctgctttgcgccttcatcttgaagcactctgaaattgcctgtttaaattaccttggaatcatggagttgctactgcttctgaatagtttagcttctactttgattttattgttagtgcattgtcgttcttgtgtcagtagcaagtttcagtgttttaatatttacaaatacaaaaatttttaataaaatattaaagccaaacttgaatgaagagacaac

SEQ ID NO: 379 - DNA, 1162 bp, Homo sapiens
ctcgccactgccgtccacggcttcattccttgaagccgtgagaccacgaacccttcgattgagaagaaccttcggtcggaagaagacttctcgtctcagtaacaataacaagaaaaacagcctagactagacgcacatcaggaagacagttaatcccgtcatgtattgacccggaaacatcatctcatttgcctataagacagagagagagaatgatagaaatgctggaagaacgagccttggggcggtatcgcccagatctgaatccacacagcagctgcttcggtccctgtaactcaaggcttcctcttaatcctctgtcctccatcaacacctggctgagcaggaacaactatgacctaggaccagggccttcaggaatcttcacccctaacttgaacttcataacactggagagagagactgtggaatggaatgactctccagagctgcagattgaaggcatattttcatctgactttgatctcaatggcgggaacaccttcatggcccctttatagctggtatgttttcttcttatggacaatgagaaacatgtaataaactgtgtttccttctcgctaggaaaccctgagttaaagctttacttccctctcaggaaccatcaaagagccataatctgtacaccctggtgcaacatttcccctggatttgatcccctttcaattgttttagccttattttacatttcttaaatctatttctctatgttgccatgtgtattatcaaatgctatttcagatgccaaccatgagctaaagcatatgttggaattattaagagaaacagagggatatacttatgtaaaataacacatataaatgcaatgctgattttttttccttaagaagtctttaacaattgcttcggaggaatctgcttttcactgaagcttcaatattttcagatcctttaataccaggtgtcaaacttattcactgggatgaattatagaaagttgcaccactttcttctgcctcatttattctcattgtaaatatgagaattttaaaaagtcttcctaattcttgctttatgatggattctatacaaacaattgaggtgctgttcactaaactactggaaacatggggaagtgagctaaggagataggaactatgaaatgacctgttttaagaaa

SEQ ID NO: 380 - DNA, 534 bp, Homo sapiens
atgctgtctctctctctttccctccgcgctgcctctccgaggtcctcccgccgagccccggcgcggggcatgaggagcccccgggtgccgcccagagaccagcaggctgcgcgcacacctagccagcggcagacggggacatgagcagcgcgcacggggtcccgcgcccggcggccagccctatccggcggcggccagcgggtcaacgctgcccgggagaatgaggcaggagccggcggcagcctcctttttttccttctcctcgccttcctgcggctccggcgctccgggtccgggccgggctgcggctctgctgcgtgccccgcgcgcccctcaaccgcctccggatgcgcttctcgatctcagcccgctgtcgccttctctctgaccctggtcccttccactgcaggctgttgctccggtgtctctgggctgctccaccacgtggtgcctgcccatcatggcatccaccaccaggtggcctttttcttggttagcctggcaaggaagataaagacatttgcaaccaagatg

SEQ ID NO: 381 - DNA, 372 bp, Homo sapiens
atggacatgagggtccccgctcagctcctggggctcctgctgctctggctcccaggtgccagatgtgacatccagttgacccagtctccatccttcctgtctgcatctgtaggagacagagtcaccatcacttgccgggccagtcagggcattagcagttatttagcctggtatcagcaaaaaccagggaaagcccctaagctcctgatctatgctgcatccactttgcaaagtggggtcccatcaaggttcagcggcagtggatctgggacagaattcactctcacaatcagcagcctgcagcctgaagattttgcaacttattactgtcaacagcttaatagttaccctcccacagtgttacaaacctga

SEQ ID NO: 382 - DNA, 1064 bp, Homo sapiens
gggggccgaggcggcggcggcggcgcgggcaagggcggcgggggcgacggcggcggccaggggggcaagggcggcttcggggcgcgggcgcgcggcttcggcgggggcggccggggccgggggcgcggcggcggcgacggcaaggatcgcggcggcggtggacagcggcggggcggcgtggccaagagcaagagccgccgcaggaagggcgccatggtggtgtcggtggagccgcaccggcacgagggcgtcttcatctaccgcggggcggaggacgcgctggtcacgctgaacatggtgccgggccagtctgtgtacggcgagaggcgcgtcacggtgaccgagggcggcgtgaagcaggagtaccgcacgtggaacccgttccgctctaagctggccgcggccatcctgggcggggtggaccagatccacatcaagcccaagtccaaggtgctgtacctgggcgccgcgtcgggcaccaccgtctcccatgtctccgacatcattggcccagacggcctggtctacgccgtcgagttctcccaccgcgccggccgcgatctggtcaacgtggccaagaagcgcaccaacatcattccggtcctggaggacgcgcggcacccgctcaagtaccgcatgctcatcgggatggtggacgtgatcttcgccgacgtggcccagccggaccagtcccgcatcgtggccctgaacgcccacaccttcctgcgcaatgggggccactttctcatctccatcaaggccaactgcatcgactccaccgcatccgccgaggctgtgtttgcttctgaggtgaggaagttgcagcaggagaacttgaagcctcaagagcagctgaccctggagccctatgagcgggaccacgctgtggtggtcggggtctaccgacctcttcccaagagcagcagcaaatagcacccagctcaggctcgcctgccatctccccaaggctgcgttgtgtttgctattattttctgtgtgttttctttgtgagtgttttgttttgttgtttttctattaaactgcataaagaaacggcaaaaaaa

SEQ ID NO: 383 - DNA, 22 bp, Artificial Sequence
  Synthetic
agcgggaaccggcattgaggaa

SEQ ID NO: 384 - DNA, 27 bp, Artificial Sequence
  Synthetic
aaaggggagttgaacgctctggcttct

SEQ ID NO: 385 - DNA, 24 bp, Artificial Sequence
  Synthetic
ttacagcgcggccaagaagactac

SEQ ID NO: 386 - DNA, 20 bp, Artificial Sequence
  Synthetic
ccatccgcacgtgacaaacc

SEQ ID NO: 387 - DNA, 23 bp, Artificial Sequence
  Synthetic
tggccgcacctcagcttattatg

SEQ ID NO: 388 - DNA, 24 bp, Artificial Sequence
  Synthetic
aggctgaggttctacgacgctgag

SEQ ID NO: 389 - DNA, 24 bp, Artificial Sequence
  Synthetic
tcgcatacgtggaaagggtctcat

SEQ ID NO: 390 - DNA, 20 bp, Artificial Sequence
  Synthetic
caaatccgctggctctgtcc

SEQ ID NO: 391 - DNA, 24 bp, Artificial Sequence
  Synthetic
atgtgtgtcaggagacttcggagg

SEQ ID NO: 392 - DNA, 22 bp, Artificial Sequence
  Synthetic
atcacttgctctgtccagggtg

SEQ ID NO: 393 - DNA, 27 bp, Artificial Sequence
  Synthetic
gagcgagtatcactggaggaaacattt

SEQ ID NO: 394 - DNA, 28 bp, Artificial Sequence
  Synthetic
atagtcacatacagggcaattgaactgc

SEQ ID NO: 395 - DNA, 22 bp, Artificial Sequence
  Synthetic
cattcagtggggtatggatacc

SEQ ID NO: 396 - DNA, 22 bp, Artificial Sequence
  Synthetic
gcttctcacccatctagatcac

SEQ ID NO: 397 - DNA, 19 bp, Artificial Sequence
  Synthetic
gcaaacacctcaatcgcca

SEQ ID NO: 398 - DNA, 48 bp, Artificial Sequence
  Synthetic
aattgatgtacccatacgatgttccagattacgctgaattcatcgata

SEQ ID NO: 399 - DNA, 48 bp, Artificial Sequence
  Synthetic
ctagtatcgatgaattcagcgtaatctggaacatcgtatgggtacatc

SEQ ID NO: 400 - DNA, 4070 bp, Homo sapiens
gtccagcctgtttaaacggaaaggacagagatcctgtctgttcaatgtaaaaaaaaaaaaaaaaaaaaaaaaaagaaaaaaagaaaaaaaaaatcagatcagaccgagagagagaggagagagggagagagagagggagagagagagggagagagagaggagagggagggagggagagagagaggggggagagcagagagagagcgcgagcgcgagcgagcgagagaagaggagaaagagagagagcagagagcgagcggagagcgaggtgtagagaaaccgagggggagagaacccgagtgtgtgtatgcgtgtgcgtgtgtgagcgcgagcgagcgagagagaggagcgagagagtgtgagcgagaaagaataaaaggaaagaagattttctctatgtatataaagatggccacgttagcaaacggacaggctgacaacgcaagcctcagtaccaacgggctcggcagcagcccgggcagtgccgggcacatgaacggattaagccacagcccggggaacccgtcgaccattcccatgaaggaccacgatgccatcaagctgttcattgggcagatcccccgcaacctggatgagaaggacctcaagcccctcttcgaggagtttggcaaaatctacgagcttacggttctgaaggacaggttcacaggcatgcacaaaggctgcgccttcctcacctactgcgagcgtgagtcagcgctgaaggcccagagcgcgctgcacgagcagaagactctgcccgggatgaaccggccgatccaggtgaagcctgcggacagcgagagccgaggaggtagtagctgcctgcgccagcccccttcacaagatagaaaactcttcgtgggcatgctcaacaagcaacagtccgaggacgacgtgcgccgccttttcgaggcctttgggaacatcgaggagtgcaccatcctgcgcgggcccgacggcaacagcaaggggtgcgcctttgtgaagtactcctcccacgccgaggcgcaggccgccatcaacgcgctacacggcagccagaccatgccgggagcctcgtccagtctggtggtcaagttcgccgacaccgacaaggagcgcacgatgcggcgaatgcagcagatggctggccagatgggcatgttcaaccccatggccatccctttcggggcctacggcgcctacgctcaggcactgatgcagcagcaagcggccctgatggcatcagtcgcgcagggcggctacctgaaccccatggctgccttcgctgccgcccagatgcagcagatggcggccctcaacatgaatggcctggcggccgcacctatgaccccaacctcaggtggcagcacccctccgggcatcactgcaccagccgtgcctagcatcccatcccccattggggtgaatggcttcaccggcctccccccacaggccaatgggcaacctgctgcggaagctgtgttcgccaatggcatccacccctacccagcacagagccccaccgccgcggaccccctgcagcaggcctacgccggagtgcagcagtatgcaggtccagctgcctaccctgctgcctatggtcagataagccaggcctttcctcagccgcctccaatgatcccccagcagcagagagaagggcccgagggctgtaacctgttcatctaccatctgccccaggagtttggggacgctgagctgatgcagatgttcctccctttcggcttcgtgagcttcgacaacccggccagcgcgcagaccgccatccaggccatgaacggcttccagatcggcatgaagaggctcaaggtgcagctgaagcggcccaaagacgccaatcgcccgtactgagcgccggcgggagcgtcccccgggggagaccaggactcgcacagggcaggatgctgaacgggctacattaaaaaacaaacctctctctatatatatttataaatgagaactgttggatgacacctttgacatatcagccaatatcaatcaagctgaagactccagacactgtctgtgtgactgtaacatttcttcaaggaaagtatagcgtctatggagttcagagggcacgtgtttgggggaaaatatatatgacatgaagaagaagatgaagaaaaatgagaaaaaaacacacaaaaggcaactttaaaacaaaatatcacgagcagacggggaggctgaagggctgggagctgggaggagacgctgcttaccgatcccggggcttttccagcccacgggcgcctgacgcaggctggggcaagtggtgcgtggggcctggtccccaaggggcggctgagaggccgccactgagcatctctatctgtcattcctttagctatttagggaccaaaggaccaaactttttattgcagatgtgtagctctatgtcaaatagagggggaatggaggaccccctccttcctgcctcatggctgttcttgaaacagcttagagcgattctatgaaaaaatgtaataaaaaattaaaaaaaaaacaaaaaacaaaaaaaacaacaaaaaaaggaaaaataacgcttcaatgcttttaaaacagcaagataatagttctttgatactttgagaggcgctttgatgaccctcatccaagtctatgacactttcctatggttttctgtattctatgtctggatggagctgttaaaagatgaacaaattggtggatatttggggaaagcaacacaaatcttaaaactcacccgtgaagtgtgagaaaacaaggaggggaacaaatgggacttaccaagcaaggtcattgttgtgaaaagtctgtaaatgcttctaactcttccccctcttaaaatcataatagttgtacagaattttaaaaaggaaaagtttaaaatacctatataatagaagaaaaattagaggaaagcaaaaaataaaaaaaaaaaataaaaaaggaaaaaaaaaacctatagaagttagcattactgctaaaatcccagatgttgtaggactgtacttttgtagagtttagacagagcatcaatcccttctccccgcgagtgcagtcggatgccgttgtccccaagggccaggccgaactcgccccacacctgcgggcgcctggctgccgacgccggtggaggccacgccgtcggtcgggaacggtcgcgtcgcccgggtcgccgccgccgccgccgccgtcatcctcgcctctcgcttccctctgggagctgcgcgcgcttcactcaccttccgcttcactcgccttccacgcttgctccagagactttccgggcaagggagaactgggaactttcatcttaaaacaactagacaacacacacacacacaaaaccttaaaaaagagagagaaaaataaacaatctttgaagaatttctgaaactgtttacaaggaattttgaaaaacagggatgtttaaatgatgccggctctgtttttctgtaaataaatttgcatattttgtaggacttttaattgtaatgatagagaaaaaaacaaggaaaactatttaatgaaagcacgatatttatctttggtaaatgactttagagcagttaaagacattgcttaaaaaactcagaatcagaaaaaacactgaattatttaagaacacatatattttaaagtataacatatttattataatttatttgcacccttgggaagattgctttggcattctgccttgattccttctcattgatgtccaggtcatctggaggccgggggttctcagacctaccagtttccctttagaagaacaaatttccagttcctctagggcctcctgcctttcctttctttctgtcaattttgttgttgttgttgtttttcattttctttttttctcttgactcctccttttaggatgtccagatgtaaaaaaaaaaaaaaaaaaaagaaaaaaagaaaaaaaaaagaaaacagctgcagttcagtacaactgctcttttcacactcaactccctaaaactccttgtaaccttctgtaactattggatgacgctttctccagcttagccctaaataaagcacagtttaaaaaaaaaaaaaaaaaa

SEQ ID NO: 401 - DNA, 1894 bp, Homo sapiens
ccgccgccgccgccgccggctcggtcccgcgcccgccatggcccgcctgacggagagcgaggcgcgccggcagcagcagcagctcctgcagccgcggccctcgcccgtgggcagcagcgggcccgagccccccggggggcagcccgacggcatgaaggacctggacgccatcaaactcttcgtgggccagatcccgcggcacctggacgagaaggacctcaagccgctcttcgagcagttcggccgcatctacgagctcacggtgctcaaagacccctacacggggatgcacaaaggctgtgccttcctcacctactgtgccagggattccgccatcaaagctcagactgccctgcacgagcagaagaccttgcccggaatggcgcggccaatccaggtgaagcctgcggacagtgaaagccgcggaggtagggaccggaagctgttcgtggggatgctgaacaagcagcagtcggaggaggacgtgctgcggctgttccagcccttcggggtcattgacgagtgcaccgtgctccgggggcctgacggcagcagcaaaggctgtgctttcgtgaagttctcctcccacacggaggcgcaggcggccatccacgccttgcatgggagccagaccatgccgggagcctcctccagcctggtggtcaagttcgccgacacggacaaggagcggacgctccggcgcatgcagcagatggtgggccagctgggcatcctgacgccgtccctcacattgcccttcagcccctacagtgcctacgcccaggctctcatgcaacagcagacaacagtcctgtccacctcgggcagctacctgagtcccggcgtggccttctcaccctgtcacatccagcagataggcgccgtcagcctcaacgggctgcctgccacacccatcgctcctgcctctgggctgcactcacccccgctgctgggcaccaccgctgtgcctggcctcgtggctcccatcaccaatggctttgcaggtgtcgtgccctttccaggtgggcaccctgccctggaaaccgtctatgccaatggccttgtgccctacccagctcagagcccgactgtggccgagacactgcatcctgccttctccggagtccagcagtacacagccatgtaccccaccgcggccatcacgcccatcgcgcacagcgtcccccagccgccgcccctcctgcagcagcagcagcgagaaggtcccgagggctgtaacctgtttatctaccacctcccccaggagtttggagacacggagctgacgcagatgttcctacccttcggcaatatcatttcctccaaggtgtttatggatcgagctaccaaccagagcaagtgtttcggcttcgtgagctttgataacccggccagcgcccaggcagccatccaggccatgaacggcttccagatcggcatgaagaggctcaaagtccagctgaagcggcccaaagacccgggacacccctactgaccgcgcccacagccgccctgaggctgtaggcatggcccagacctgcgtgatttgtacaatgtactttatttctgctacgagtaatttcatgaagtttcaacttgcaaactgacttttgggacaaaccaacacacacacagaagagaaagcaaagaacttggaactttgggttgactcggtttgagttttgtgtcaaagaagatttcccgcggctgaagaggttggtgttcctgttacgtgtttcaggtgagaagcagcaaagcgtcttaatgttcaaaacgcctctctttggtctggagaaaaaaaaaaaaaaaaaaaaacaactaaaaatttatttaataaaagttttacttgctaaaaaaaaaaaaaaaaaaaaaaaaaaaaaaaaaaaaaaaaaaa

SEQ ID NO: 402 - DNA, 3418 bp, Homo sapiens
gctggggctcggggctcggctctgggagagctcgggcgggagcccagagagagccgcacggggacctcaagccagaccccagcgttcagccgccacctcggcccgggcccgccccgccccggccccgcccctttcctgcccgccccaccccctctacgcccctccacccggaccccgccccctgggcagccccccgccctctccgcccgggctccgccccctccccctggccctcgccaccggtccagggaggggacggcgggacaggcgggaccagtgggaccggcgggagggctgacagggcggggacatggccgcggcgccgggagggtcagcgcagcccgctggccccggcccgcgcctgggtttcagcaccgcggacagcggcgtcggcatgagcgggctaaaccccggtcccgccgtacccatgaaggaccacgacgccatcaagctcttcgtggggcagatcccgcggggcttggacgagcaggacctcaagccgctgttcgaggagttcggccgcatctacgagctgacggtgctgaaggaccggctcaccggcctccacaaaggctgtgccttcctcacctactgcgcccgggactctgctctcaaggcccagagtgcactgcacgagcagaagaccctgccagggatgaatcgtccgatccaagtgaagccagctgccagtgagggccgaggagaggaccgaaagctgtttgtggggatgctgggcaagcagcagggtgaggaggacgtcagacgcctgttccagccctttggccacatcgaggagtgcacggtcctgcggagtcctgacggcaccagtaaaggctgtgcctttgtgaagttcgggagtcaaggggaagctcaggcggccatccggggtctgcacggcagccggaccatggcgggcgcctcgtccagcctcgtggtcaagctggcggacaccgaccgggagcgcgcgctgcggcggatgcagcagatggccggccacctgggcgccttccaccccgcgccactgccgctaggggcctgcggcgcctacaccacggcgatcctgcagcaccaggcggccctgctggcggcggcacagggcccaggcctaggcccggtggcggcagtggcggcccagatgcaacacgtggcggcctttagcctggtagctgcgcctctgttgcccgcggcagcagccaactccccgcctggcagcggccctggcaccctcccaggtcttccggcgcccatcggggtcaatggattcggccctctgaccccccagaccaatggccagccgggctccgacacgctctacaataacgggctctccccttatccagcccagagccccggcgtggctgaccccctgcagcaggcctacgctgggatgcaccactacgcagcagcctatccgtcggcctatgccccagtgagcacagcttttccccagcagccttcagccctgccccagcagcagagagaaggccccgaaggctgtaacctcttcatctatcacctgcctcaggagtttggtgatgcggaactcatacagacattcctgccctttggagccgttgtctctgctaaagtctttgtggatcgagccaccaaccagagcaagtgttttgggtttgttagttttgacaatccaactagtgcccagactgctattcaggcgatgaatggctttcaaattggcatgaagaggctcaaggtccagctaaagcggcccaaggatgccaaccggccttactgacctgctttcactgaccagccacagaaagaaacagaagagtgagaagaaaggagaggaaaagcacagaaacgcttgagcagcccttcccgaaggagcagctgcggacggaggtggatcggacccaaggctggtgcctggggctaaggccactctaaggattgtttttatcaagtgggttgttctgtgcctgcagcatagagcgcaggctggcagagcaaatagggctggtgaggagtgactgtccaggggaaccagcagagggcgttgggggtgccaagggcttctccgcaagggaagcccagatttacttctttcaaaatcatatcattccttagagtttagggaccaaaggactattgcttttttaagaatatatatatctatataaattaaaacaaagaaacaaacaaacaaaaaacaagacaaacaactacaaaaaaagacagtatagagtctcataaaagctgcctttaaatatccctaggagacagggtgaaggagacccttgacagccccagcctaggcagatgggggctgtggaaagattgttctgtgtctcattccctcttaagccactcccccaccctgcccttttaaaaataattaaggatttgaggtctaggctcacatgcaggtaatgagaacgttatggaagcagtgaacccacaatccacaatccccaaactcagagtgcatcccagaagaggccccaggcagagctcaggttggccctggcctttgccatcccgggaggccccctagccagcaagagtgggattgcctttcctgtggaaccactgcttccccaggcgggaagaaagagggagttctggccacctgagcctttcccttgccaatccaggtagacagaggccctgcctttggctgagctgagacacctcctgtttcccttccccttgaaccagtcccagtgtccccttgctccaggctaccttctgtctcttagtctaagtttgcccacctgtaaagtagattcaggatatctgtagagggctgtgacaacagacttggaaggtttgctactgtatatactgccattgagaaggggaaatttttcaatatgtagaagcttcagaattagaggtccctctttaccccagacctgggagggaagtagatgttttgccaaaatacttcttcattcctttaaaaactacatctttcctatgcaagagtgtctcacatgtgcttaaccgaggtgcttctagttggtgagcagtgttgagcttagaagtggtgtgtgctctgtctgtctgtctttgtctgtctgttgtatacagtgggtgccatataaagctgatcaatggtggtgcttcctgcctgcttctgtgagatgggcaaaagattcagcttagaacaccatgactcaccttgccttggtcagcctttcctgggcctgtagggccttgcacatatttttcccaggaggatttcccctccaccccacaggcatggatcagcttggtctgaggccccagctgtgtggggtccctctaatccccagatgttgctgaggctgaaggcctctgatctgataacatgtcagatagtaaaagatgtgggggtgggggtggagggctcctccttcataacagtttctaagaaaacttgttcccacctgttaaaaaaaaaaaaaaaaaa

We claim:

1. A method for identifying a patient with breast cancer having a reduced disease-free survival time, the method comprising:
(a) assaying a tumor sample from the patient for expression of one or a plurality of genes selected from the genes contained in Tables 1 or 3;
(b) detecting differential expression of one or a plurality of the genes contained assayed in step (a);
(c) identifying a patient with reduced disease-free survival, wherein differential expression one or a plurality of said gene or genes is detected in step (b).

2. The method of claim 1, wherein the assay of step (a) comprises treating the tumor sample to prepare biomolecules from said genes comprising mRNA, cDNA or protein, wherein said prepared biomolecules are capable of being detected or contacted by a reagent used in said assay and thereby detected.

3. The method of claim 1 wherein one or a plurality of genes further comprise those contained in Tables 2, 4, or 6.

4. The method of claim 1, wherein a plurality of genes detected are Adaptor-related protein complex 3, beta 2 subunit; Bassoon (presynaptic cytomatrix protein); Complexin 1; Complexin 2; Dispatched homolog 2 (Drosophila); Golgi Autoantigen 7B; Hemoglobin alpha 2; Potassium voltage-gated channel Shab-related subfamily member 1; Mitogen-activated protein kinase 8 interacting protein 2; Matrix metallopeptidase 24 (membrane-inserted); PiggyBac transposable element derived 5; RGD motif, leucine rich repeats, tropomodulin domain and proline-rich containing; Reticulon 2; RUN domain containing 3A; Secretory carrier membrane protein 5; Synaptosomal-associated protein, 25kDa; Stathmin-like 3; Transmembrane protein 145; Transmembrane protein 198; or VGF nerve growth factor inducible.

5. The methods of claim 1, 3 or 4 wherein a plurality of genes are detected.

6. The methods of claim 1, 3 or 4 wherein said differential expression is elevated gene expression.

7. The methods of claim 1, 3 or 4 wherein the cancer is estrogen receptor positive breast cancer.

8. The methods of claim 1, 3 or 4 wherein the cancer is estrogen receptor negative breast cancer.

9. The method of claim 1, wherein the plurality of genes detected comprise LIN28 or CELF4, CELF5, or CELF6.

10. The method of claim 9, wherein the genes are assayed by microarray, reverse transcriptase-polymerase chain reaction assay (RT-PCR), quantitative RT-PCR (qRT-PCR), real-time polymerase chain reaction assay (RT-RTPCR), or immunoassay or immunohistochemical assay.

11. A method for identifying a patient with breast cancer having a reduced disease-free survival time, the method comprising:
(a) assaying a tumor sample from the patient for altered or reduced expression of RE1 Silencing Transcription Factor/Neuron restrictive silencing factor (REST/NRSF);
(b) detecting altered or reduced expression of REST/NRSF assayed in step (a);
(c) identifying a patient with reduced disease-free survival, wherein REST/NRSF expression is altered or reduced as detected in step (b).

12. The method of claim 11, wherein the assay of step (a) comprises treating the tumor sample to prepare a REST/NRSF biomolecule from said genes comprising mRNA, cDNA or protein, wherein said prepared biomolecules are capable of being detected or contacted by a reagent used in said assay and thereby detected.

13. The method of claim 11, wherein the cancer is estrogen receptor positive breast cancer.

14. The method of claim 11, wherein the cancer is estrogen receptor negative breast cancer.

15. The method of claim 11, wherein reduced protein expression of REST/NRSF is detected.

16. The method of claim 11, wherein altered protein expression is detected.

17. The method of claim 16, wherein the altered protein expression is REST4 splice variant.

18. The methods of claim 1 or 3, wherein mRNA of the genes in Table 1, 2, 3, 4, or 6 is isolated and assayed to determine gene expression levels.

19. The methods of claim 1 or 3 wherein protein products of the genes in Table 1, 2, 3, 4, or 6 are isolated and assayed to determine gene expression levels.

20. The methods of claim 18, wherein mRNA is assayed by microarray, reverse transcriptase-polymerase chain reaction assay (RT-PCR), reverse transcriptase-polymerase chain reaction assay (qRT-PCR), or real-time reverse transcriptase-polymerase chain reaction assay (RT-RTPCR).

21. The method of claim 19 wherein protein is assayed by immunoassay or immunohistochemical assay.

22. The method of claim 11, wherein REST/NRSF mRNA or REST4 mRNA is assayed to determine gene expression levels.

23. The method of claim 11, wherein protein products of REST/NRSF or REST4 are assayed to determine gene expression levels.

24. The method of claim 22, wherein REST/NRSF mRNA is assayed by reverse transcriptase-polymerase chain reaction assay (RT-PCR), reverse transcriptase-polymerase chain reaction assay (qRT-PCR), or real-time reverse transcriptase-polymerase chain reaction assay (RT-RTPCR).

25. The method of claim 23, wherein protein is assayed by immunoassay or immunohistochemical assay.

26. The method of claim 25, wherein said immunoassay or immunohistochemical assay is performed using an antibody immunologically specific for a DNA binding domain of REST/NRSF protein.

27. The method of claim 26, wherein the antibody is immunologically specific for the C-terminal DNA binding domain of REST/NRSF protein.

28. A method for identifying a patient with breast cancer having a reduced disease-free survival time, the method comprising:
(a) assaying a tumor sample from the patient for expression of miR-124;
(b) detecting the presence miR-124 in the sample assayed in step (a);
(c) identifying a patient with reduced disease-free survival, wherein miR-124 is detected in step (b).

29. The method of claim 28, wherein the tumor sample is treated to prepare a biomolecule from said miR-124 comprising mRNA or cDNA prepared therefrom, wherein said prepared biomolecule is capable of being detected or contacted by a reagent used in said assay and thereby detected.

30. The method of claim 1, 11 or 28, wherein a portion of the tumor sample is substantially consumed in said assay.

31. A kit for diagnosing or prognosing reduced disease-free survival time in a human with cancer, the kit comprising a plurality of nucleotide primers that each specifically hybridize to one or a plurality of the genes identified in Table 1, 3, or 6.

32. A kit for diagnosing or prognosing reduced disease-free survival time in a human with cancer, the kit comprising a plurality of nucleotide primers that each specifically hybridize to REST4 or mir-124.

33. A kit for diagnosing or prognosing reduced disease-free survival time in a human with cancer, the kit comprising a plurality of antibodies that each specifically bind to a protein produced by expression of one or a plurality of the genes identified in Table 1, 3, or 6.

34. A kit for diagnosing or prognosing reduced disease-free survival time in a human with cancer, the kit comprising an antibody specific for the C-terminus of REST/NRSF protein.
